(19) United States
(12) Patent Application Publication
(10) Pub. No.: US 2022/0047621 A1
(43) Pub. Date: Feb. 17, 2022

(54) RNAi CONSTRUCTS AND METHODS FOR INHIBITING MARC1 EXPRESSION

(71) Applicant: AMGEN INC., Thousand Oaks, CA (US)

(72) Inventors: Justin K. MURRAY, Moorpark, CA (US); Jun ZHANG, Foster City, CA (US); Oliver HOMANN, Berkeley, CA (US); Jason C. LONG, Newbury Park, CA (US); Bryan MEADE, Westlake Village, CA (US)

(73) Assignee: AMGEN INC., Thousand Oaks, CA (US)

(21) Appl. No.: 17/401,114

(22) Filed: Aug. 12, 2021

Related U.S. Application Data
(60) Provisional application No. 63/065,190, filed on Aug. 13, 2020.
(60) Provisional application No. 63/214,016, filed on Jun. 23, 2021.

(51) Int. Cl. A61K 31/7125; C12Q 1/6869; C12N 15/113; A61P 1/16

(52) U.S. Cl. CPC A61K 31/7125; A61P 1/16; C12N 15/113; C12Q 1/6869

(57) ABSTRACT

The present invention relates to RNAi constructs for reducing expression of the MARC1 gene. Methods of using such RNAi constructs to treat or prevent liver fibrosis and fatty liver diseases, such as nonalcoholic fatty liver disease and nonalcoholic steatohepatitis, are also described.

### CROSS-REFERENCE TO RELATED APPLICATIONS

[0001] This application claims the benefit of U.S. Provisional Application No. 63/065,190, filed Aug. 13, 2020, and U.S. Provisional Application No. 63/214,016, filed Jun. 23, 2021, both of which are hereby incorporated by reference in their entireties.

### DESCRIPTION OF THE TEXT FILE SUBMITTED ELECTRONICALLY

[0002] The present application contains a Sequence Listing, which has been submitted electronically in ASCII format and is hereby incorporated by reference in its entirety. The computer readable format copy of the Sequence Listing, which was created on Aug. 9, 2021, is named A-2664-US-NP ST25 and is 1,064 kilobytes in size.

### FIELD OF THE INVENTION

[0003] The present invention relates to compositions and methods for modulating liver expression of mitochondrial amidoxime-reducing component 1 (mARC1) protein. In particular, the present invention relates to nucleic acid-based therapeutics for reducing MARC1 gene expression via RNA interference and methods of using such nucleic acid-based therapeutics to reduce circulating lipid levels and to treat or prevent fatty liver disease and liver fibrosis.

### BACKGROUND OF THE INVENTION

[0004] Comprising a spectrum of hepatic pathologies, nonalcoholic fatty liver disease (NAFLD) is the most common chronic liver disease in the world, the prevalence of which doubled in the last 20 years and now is estimated to affect approximately 20-30% of the world population. In some individuals the accumulation of ectopic fat in the liver, called steatosis, triggers inflammation and hepatocellular injury leading to a more advanced stage of disease called, nonalcoholic steatohepatitis (NASH). NASH is defined as lipid accumulation with evidence of cellular damage, inflammation, and different degrees of scarring or fibrosis. As of 2015, 75-100 million Americans are predicted to have NAFLD, whereas NASH accounts for approximately 10-30% of NAFLD diagnoses.

[0005] The mARC1 protein is a molybdenum-containing protein in the mitochondrial outer membrane that catalyzes the reduction of N-oxygenated molecules (Klein et al., J Biol Chem, Vol. 287(51):42795-42803, 2012; Ott et al., J Biol Inorg Chem, Vol. 20(2):265-275, 2015). It is a highly effective counterpart to one of the most prominent biotransformation enzymes, CYP450, and is involved in activation of amidoxime prodrugs as well as inactivation of other drugs containing N-hydroxylated functional groups (Neve et al., PLoS One, Vol. 10(9):e0138487, 2015; Ott et al., 2015, supra). Recently, predicted loss-of-function variants in the MARC1 gene have been reported to be associated with decreased blood levels of cholesterol and liver enzymes, reduced liver fat, and protection from cirrhosis. See Emdin et al., bioRxiv 594523; //doi.org/10.1101/594523, 2019; and Emdin et al., PLoS Genet, Vol. 16(4): e1008629, 2020. Specifically, the A165T missense variant in the mARC1 coding region was associated with protection from all-cause cirrhosis, lower levels of hepatic fat on computed tomographic imaging and lower odds of physician-diagnosed fatty liver as well as lower blood levels of alanine transaminase, alkaline phosphatase, total cholesterol, and LDL cholesterol levels in an analysis of 12,361 all-cause cirrhosis cases and 790,095 controls from eight cohorts (Emdin et al., 2020, supra). Additional MARC1 alleles (M187K missense mutation and R200Ter truncation mutation) that associated with lower cholesterol levels, liver enzyme levels and reduced risk of cirrhosis were also identified (Emdin et al., 2020, supra). These data suggest that deficiency of the mARC1 enzyme protects against chronic liver disease and cirrhosis. Accordingly, therapeutics targeting mARC1 function represent a novel approach to reducing cholesterol levels (e.g. non-HDL cholesterol or LDL-cholesterol levels) and liver fibrosis, and treating or preventing liver diseases, particularly NAFLD and NASH.

### SUMMARY OF THE INVENTION

[0006] The present invention is based, in part, on the design and generation of RNAi constructs that target the MARC1 gene and reduce its expression in liver cells. The sequence-specific inhibition of MARC1 gene expression is useful for treating or preventing conditions associated with elevated lipid levels and liver fat, such as cardiovascular disease and fatty liver disease. Accordingly, in one embodiment, the present invention provides an RNAi construct comprising a sense strand and an antisense strand, wherein the antisense strand comprises a region having a sequence that is substantially complementary to a mARC1 mRNA sequence. For instance, in some embodiments, the antisense strand comprises a sequence that is substantially complementary to the sequence of at least 15 contiguous nucleotides of a region of the human mARC1 mRNA sequence (SEQ ID NO: 1) with no more than 1, 2, or 3 mismatches. In certain embodiments, the antisense strand comprises a region having at least 15 contiguous nucleotides from an antisense sequence listed in Table 1 or Table 2.

[0007] In some embodiments, the sense strand of the RNAi constructs described herein comprises a sequence that is sufficiently complementary to the sequence of the antisense strand to form a duplex region of about 15 to about 30 base pairs in length. In these and other embodiments, the sense and antisense strands are each independently about 19 to about 30 nucleotides in length. In some embodiments, the RNAi constructs comprise one or two blunt ends. In other embodiments, the RNAi constructs comprise one or two nucleotide overhangs. Such nucleotide overhangs may comprise 1 to 6 unpaired nucleotides and can be located at the 3′ end of the sense strand, the 3′ end of the antisense strand, or the 3′ end of both the sense and antisense strand. In certain embodiments, the RNAi constructs comprise an overhang of two unpaired nucleotides at the 3′ end of the sense strand and the 3′ end of the antisense strand. In other embodiments, the RNAi constructs comprise an overhang of two unpaired nucleotides at the 3′ end of the antisense strand and a blunt end at the 3′ end of the sense strand/5′ end of the antisense strand.

[0008] The RNAi constructs of the invention may comprise one or more modified nucleotides, including nucleotides having modifications to the ribose ring, nucleobase, or phosphodiester backbone. In some embodiments, the RNAi constructs comprise one or more 2′-modified nucleotides. Such 2′-modified nucleotides can include 2′-fluoro modified nucleotides, 2′-O-methyl modified nucleotides, 2′-O-methoxyethyl modified nucleotides, 2′-O-alkyl modified nucleotides, 2′-O-allyl modified nucleotides, bicyclic nucleic acids (BNA), deoxyribonucleotides, or combinations thereof. In one particular embodiment, the RNAi constructs comprise one or more 2′-fluoro modified nucleotides, 2′-O-methyl modified nucleotides, or combinations thereof. In some embodiments, all of the nucleotides in the sense and antisense strand of the RNAi construct are modified nucleotides. Abasic nucleotides may be incorporated into the RNAi constructs of the invention, for example, as the terminal nucleotide at the 3′ end, the 5′ end, or both the 3′ end and the 5′ end of the sense strand. In such embodiments, the abasic nucleotide may be inverted, e.g. linked to the adjacent nucleotide through a 3′-3′ internucleotide linkage or a 5′-5′ internucleotide linkage.

[0009] In some embodiments, the RNAi constructs comprise at least one backbone modification, such as a modified internucleotide or internucleoside linkage. In certain embodiments, the RNAi constructs described herein comprise at least one phosphorothioate internucleotide linkage. In particular embodiments, the phosphorothioate internucleotide linkages may be positioned at the 3′ or 5′ ends of the sense and/or antisense strands. For instance, in some embodiments, the antisense strand comprises two consecutive phosphorothioate internucleotide linkages between the terminal nucleotides at both the 3′ and 5′ ends. In some such embodiments, the sense strand comprises one or two phosphorothioate internucleotide linkages between the terminal nucleotides at its 3′ end.

[0010] In certain embodiments, the antisense strand and/or the sense strand of the RNAi constructs of the invention may comprise or consist of a sequence from the antisense and sense sequences listed in Table 1 or Table 2. In certain such embodiments, the RNAi construct may be any one of the duplex compounds listed in any one of Tables 1 to 24. In some embodiments, the RNAi construct is D-1044, D-1061, D-1062, D-1067, D-1083, D-1090, D-1092, D-1093, D-1095, D-1138, D-1139, D-1143, D-1170, D-1177, D-1180, D-1191, D-1245, D-2000, D-2002, D-2003, D-2004, D-2011, D-2026, D-2028, D-2032, D-2033, D-2034, D-2035, D-2036, D-2042, D-2044, D-2045, D-2046, D-2050, D-2078, D-2079, D-2081, D-2182, D-2196, D-2238, D-2241, D-2243, D-2246, D-2255, D-2356, D-2258, D-2301, D-2316, D-2317, D-2329, D-2332, D-2341, D-2344, D-2357, D-2399, or D-2510. In certain embodiments, the RNAi construct is D-2079, D-2081, D-2196, D-2238, D-2241, D-2255, D-2258, D-2317, D-2332, D-2357, or D-2399.

[0011] In some embodiments, the RNAi constructs of the invention may target a particular region of the human mARC1 mRNA transcript (e.g. the human mARC1 mRNA transcript sequence set forth in SEQ ID NO: 1). For instance, in certain embodiments, the RNAi constructs comprise a sense strand and an antisense strand, wherein the antisense strand comprises a region having a sequence that is substantially complementary to the sequence of at least 15 contiguous nucleotides of nucleotides 1205 to 1250 of SEQ ID NO: 1. In other embodiments, the antisense strand comprises a region having a sequence that is substantially complementary to the sequence of at least 15 contiguous nucleotides of nucleotides 1209 to 1239 of SEQ ID NO: 1. In yet other embodiments, the antisense strand comprises a region having a sequence that is substantially complementary to the sequence of at least 15 contiguous nucleotides of nucleotides 1345 to 1375 of SEQ ID NO: 1. In still other embodiments, the antisense strand comprises a region having a sequence that is substantially complementary to the sequence of at least 15 contiguous nucleotides of nucleotides 2039 to 2078 of SEQ ID NO: 1. In certain other embodiments, the antisense strand comprises a region having a sequence that is substantially complementary to the sequence of at least 15 contiguous nucleotides of nucleotides 2048 to 2074 of SEQ ID NO: 1. In any of the above embodiments, the sequence of the antisense strand may be substantially complementary to the sequence of at least 15 contiguous nucleotides of the specific regions of the human mARC1 transcript (SEQ ID NO: 1) with no more than 1, 2, or 3 mismatches between the sequence of the antisense strand and the sequence of the specific regions of the human mARC1 transcript. In some such embodiments in which a mismatch occurs between the sequence of the antisense strand and the sequence of the target mARC1 mRNA sequence, the mismatch may be located between the target mARC1 mRNA sequence and the nucleotide at position 6 and/or position 8 from the 5′ end of the antisense strand. In other embodiments, the sequence of the antisense strand may be fully complementary to the sequence of at least 15 contiguous nucleotides of the specific regions of the human mARC1 transcript (SEQ ID NO: 1).

[0012] The RNAi constructs of the invention may further comprise a ligand to facilitate delivery or uptake of the RNAi constructs to specific tissues or cells, such as liver cells. In certain embodiments, the ligand targets delivery of the RNAi constructs to hepatocytes. In these and other embodiments, the ligand may comprise galactose, galactosamine, or N-acetyl-galactosamine (GalNAc). In certain embodiments, the ligand comprises a multivalent galactose or multivalent GalNAc moiety, such as a trivalent or tetravalent galactose or GalNAc moiety. The ligand may be covalently attached to the 5′ or 3′ end of the sense strand of the RNAi construct, optionally through a linker. In some embodiments, the RNAi constructs comprise a ligand and linker having a structure according to any one of Formulas I to IX described herein. In certain embodiments, the RNAi constructs comprise a ligand and linker having a structure according to Formula VII. In other embodiments, the RNAi constructs comprise a ligand and linker having a structure according to Formula IV.

[0013] The present invention also provides pharmaceutical compositions comprising any of the RNAi constructs described herein and a pharmaceutically acceptable carrier, excipient, or diluent. Such pharmaceutical compositions are particularly useful for reducing expression of the MARC1 gene in the cells (e.g. liver cells) of a patient in need thereof. Patients who may be administered a pharmaceutical composition of the invention can include patients diagnosed with or at risk of cardiovascular disease, fatty liver disease, liver fibrosis, or cirrhosis and patients with elevated blood levels of cholesterol (e.g. total cholesterol, non-HDL cholesterol, or LDL-cholesterol). Accordingly, the present invention includes methods of treating, preventing, or reducing the risk of developing fatty liver disease (e.g. NAFLD, NASH, alcoholic fatty liver disease, or alcoholic steatohepatitis), liver fibrosis, or cardiovascular disease in a patient in need thereof comprising administering an RNAi construct or pharmaceutical composition described herein. In certain embodiments, the present invention provides methods for reducing blood levels (serum or plasma) of cholesterol (e.g. total cholesterol, non-HDL cholesterol, or LDL-cholesterol) in a patient in need thereof comprising administering an RNAi construct or pharmaceutical composition described herein.

[0014] The use of mARC1-targeting RNAi constructs in any of the methods described herein or for preparation of medicaments for administration according to the methods described herein is specifically contemplated. For instance, the present invention includes a mARC1-targeting RNAi construct for use in a method for treating, preventing, or reducing the risk of developing fatty liver disease (e.g. NAFLD, NASH, alcoholic fatty liver disease, or alcoholic steatohepatitis), liver fibrosis, or cardiovascular disease in a patient in need thereof. The present invention also includes a mARC1-targeting RNAi construct for use in a method for reducing blood levels (serum or plasma) of cholesterol (e.g. total cholesterol, non-HDL cholesterol, or LDL-cholesterol) in a patient in need thereof.

[0015] The present invention also encompasses the use of a mARC1-targeting RNAi construct in the preparation of a medicament for treating, preventing, or reducing the risk of developing fatty liver disease (e.g. NAFLD, NASH, alcoholic fatty liver disease, or alcoholic steatohepatitis), liver fibrosis, or cardiovascular disease in a patient in need thereof. In certain embodiments, the present invention provides the use of a mARC1-targeting RNAi construct in the preparation of a medicament for reducing blood levels (serum or plasma) of cholesterol (e.g. total cholesterol, non-HDL cholesterol, or LDL-cholesterol) in a patient in need thereof.

### BRIEF DESCRIPTION OF THE DRAWINGS

[0016] FIG. 1 shows the nucleotide sequence of a transcript of the human MARC1 gene (Ensembl transcript no. ENST00000366910.9; SEQ ID NO: 1). The transcript sequence is depicted as the complementary DNA (cDNA) sequence with thymine bases replacing uracil bases.

[0017] FIGS. 2A and 2B are bar graphs showing liver expression of mARC1 mRNA (FIG. 2A) and mARC2 mRNA (FIG. 2B) in ob/ob mice receiving subcutaneous injections of buffer, mARC1 siRNA (duplex no. D-1000), or a control siRNA (duplex no. D-1002) once every two weeks for six weeks. mRNA levels were assessed by qPCR at six weeks and are expressed relative to mRNA levels in animals receiving buffer only injections.

[0018] FIGS. 3A-3H are graphs depicting serum levels of total cholesterol (CHOL; FIG. 3A), LDL cholesterol (LDL; FIG. 3B), HDL cholesterol (HDL; FIG. 3C), triglycerides (TG; FIG. 3D), alanine aminotransferase (ALT; FIG. 3E), aspartate aminotransferase (AST; FIG. 3F), C-reactive protein (CRP; FIG. 3G), and tissue inhibitor of metalloproteinases-1 (TIMP-1; FIG. 3H) in ob/ob mice receiving subcutaneous injections of buffer, mARC1 siRNA (duplex no. D-1000), or a control siRNA (duplex no. D-1002) once every two weeks for six weeks. Serum levels of the different analytes were measured using a clinical analyzer at the six-week time point. Mean values±standard error of the mean (SEM) are shown. *=p<0.05;**=p<0.01 vs. buffer control group.

[0019] FIGS. 4A and 4B are graphs showing liver levels of triglycerides (liver TG; FIG. 4A) or total cholesterol (liver TC; FIG. 4B) at six weeks in ob/ob mice receiving subcutaneous injections of buffer, mARC1 siRNA (duplex no. D-1000), or a control siRNA (duplex no. D-1002) once every two weeks for six weeks. Mean values±SEM are shown. ***=p<0.001 vs. buffer control group.

[0020] FIGS. 5A and 5B are bar graphs showing liver expression of mARC1 mRNA (FIG. 5A) and mARC2 mRNA (FIG. 5B) in c57BL/6 mice on a standard chow diet (chow control) or a 0.2% cholesterol diet (TD190883). Mice on the 0.2% cholesterol diet received subcutaneous injections of buffer (TD190883 control), mARC1 siRNA (duplex no. D-1000), or a control siRNA (duplex no. D-1002) once every two weeks for 24 weeks. mRNA levels were assessed by qPCR at 24 weeks and are expressed relative to mRNA levels in the chow control animals.

[0021] FIGS. 6A-6F are graphs depicting serum levels of aspartate aminotransferase (AST; FIG. 6A), alanine aminotransferase (ALT; FIG. 6B), total cholesterol (FIG. 6C), LDL cholesterol (LDL-c; FIG. 6D), HDL cholesterol (HDL-c; FIG. 6E), and triglycerides (FIG. 6F) in c57BL/6 mice on a standard chow diet (chow control) or a 0.2% cholesterol diet (TD190883). Mice on the 0.2% cholesterol diet received subcutaneous injections of buffer (TD190883 control), mARC1 siRNA (duplex no. D-1000), or a control siRNA (duplex no. D-1002) once every two weeks for 24 weeks. Serum levels of the different analytes were measured using a clinical analyzer at the indicated time post dosing. Mean values±standard error of the mean (SEM) are shown. *=p<0.05;**=p<0.01, ***=p<0.001 vs. TD190883 control group.

[0022] FIGS. 7A-7D are graphs showing body weight (FIG. 7A), liver weight (FIG. 7B), liver levels of triglycerides (FIG. 7C) and liver levels of total cholesterol (FIG. 7D) at 24 weeks in c57BL/6 mice on a standard chow diet (chow control) or a 0.2% cholesterol diet (TD190883). Mice on the 0.2% cholesterol diet received subcutaneous injections of buffer (TD190883 control), mARC1 siRNA (duplex no. D-1000), or a control siRNA (duplex no. D-1002) once every two weeks for 24 weeks. Mean values±SEM are shown.

[0023] FIGS. 8A-8F are antisense strand and sense strand serum concentration-time profiles in cynomolgus macaque monkeys following a single 3 mg/kg s.c. dose of GalNAc-conjugated mARC1 siRNA molecules D-2241 (FIGS. 8A and 8B), D-2081 (FIGS. 8C and 8D), and D-2258 (FIGS. 8E and 8F). FIGS. 8A, 8C, and 8E depict the concentration-time profiles from 0.083 to 24 hours post dose, whereas FIGS. 8B, 8D, and 8F depict the concentration-time profiles from 0.083 to 1056 hours post dose.

### DETAILED DESCRIPTION

[0024] The present invention is directed to compositions and methods for regulating the expression of the MARC1 gene in a cell or mammal. In some embodiments, compositions of the invention comprise RNAi constructs that target a mRNA transcribed from the MARC1 gene, particularly the human MARC1 gene, and reduce expression of the mARC1 protein in a cell or mammal. Such RNAi constructs are useful for reducing serum lipid levels (e.g., total cholesterol and LDL-cholesterol levels), treating or preventing various forms of cardiovascular disease and fatty liver disease, such as NAFLD and NASH, and reducing liver fibrosis and the risk of progression to cirrhosis.

[0025] As used herein, the term “RNAi construct” refers to an agent comprising an RNA molecule that is capable of downregulating expression of a target gene (e.g. MARC1 gene) via an RNA interference mechanism when introduced into a cell. RNA interference is the process by which a nucleic acid molecule induces the cleavage and degradation of a target RNA molecule (e.g. messenger RNA or mRNA molecule) in a sequence-specific manner, e.g. through an RNA-induced silencing complex (RISC) pathway. In some embodiments, the RNAi construct comprises a double-stranded RNA molecule comprising two antiparallel strands of contiguous nucleotides that are sufficiently complementary to each other to hybridize to form a duplex region. “Hybridize” or “hybridization” refers to the pairing of complementary polynucleotides, typically via hydrogen bonding (e.g. Watson-Crick, Hoogsteen or reversed Hoogsteen hydrogen bonding) between complementary bases in the two polynucleotides. The strand comprising a region having a sequence that is substantially complementary to a target sequence (e.g. target mRNA) is referred to as the “antisense strand” or “guide strand.” The “sense strand” or “passenger strand” refers to the strand that includes a region that is substantially complementary to a region of the antisense strand. In some embodiments, the sense strand may comprise a region that has a sequence that is substantially identical to the target sequence.

[0026] A double-stranded RNA molecule may include chemical modifications to ribonucleotides, including modifications to the ribose sugar, base, or backbone components of the ribonucleotides, such as those described herein or known in the art. Any such modifications, as used in a double-stranded RNA molecule (e.g. siRNA, shRNA, or the like), are encompassed by the term “double-stranded RNA” for the purposes of this disclosure.

[0027] As used herein, a first sequence is “complementary” to a second sequence if a polynucleotide comprising the first sequence can hybridize to a polynucleotide comprising the second sequence to form a duplex region under certain conditions, such as physiological conditions. Other such conditions can include moderate or stringent hybridization conditions, which are known to those of skill in the art. A first sequence is considered to be fully complementary (100% complementary) to a second sequence if a polynucleotide comprising the first sequence base pairs with a polynucleotide comprising the second sequence over the entire length of one or both nucleotide sequences without any mismatches. A sequence is “substantially complementary” to a target sequence if the sequence is at least about 80%, 85%, 90%, 95%, 96%, 97%, 98%, or 99% complementary to a target sequence. Percent complementarity can be calculated by dividing the number of bases in a first sequence that are complementary to bases at corresponding positions in a second or target sequence by the total length of the first sequence. A sequence may also be said to be substantially complementary to another sequence if there are no more than 5, 4, 3, or 2 mismatches over a 30 base pair duplex region when the two sequences are hybridized. Generally, if any nucleotide overhangs, as defined herein, are present, the sequence of such overhangs is not considered in determining the degree of complementarity between two sequences. By way of example, a sense strand of 21 nucleotides in length and an antisense strand of 21 nucleotides in length that hybridize to form a 19 base pair duplex region with a 2-nucleotide overhang at the 3′ end of each strand would be considered to be fully complementary as the term is used herein.

[0028] In some embodiments, a region of the antisense strand comprises a sequence that is substantially or fully complementary to a region of the target RNA sequence (e.g. mARC1 mRNA sequence). In such embodiments, the sense strand may comprise a sequence that is fully complementary to the sequence of the antisense strand. In other such embodiments, the sense strand may comprise a sequence that is substantially complementary to the sequence of the antisense strand, e.g. having 1, 2, 3, 4, or 5 mismatches in the duplex region formed by the sense and antisense strands. In certain embodiments, it is preferred that any mismatches occur within the terminal regions (e.g. within 6, 5, 4, 3, or 2 nucleotides of the 5′ and/or 3′ ends of the strands). In one embodiment, any mismatches in the duplex region formed from the sense and antisense strands occur within 6, 5, 4, 3, or 2 nucleotides of the 5′ end of the antisense strand.

[0029] In certain embodiments, the sense strand and antisense strand of the double-stranded RNA may be two separate molecules that hybridize to form a duplex region but are otherwise unconnected. Such double-stranded RNA molecules formed from two separate strands are referred to as “small interfering RNAs” or “short interfering RNAs” (siRNAs). Thus, in some embodiments, the RNAi constructs of the invention comprise an siRNA.

[0030] In other embodiments, the sense strand and the antisense strand that hybridize to form a duplex region may be part of a single RNA molecule, i.e. the sense and antisense strands are part of a self-complementary region of a single RNA molecule. In such cases, a single RNA molecule comprises a duplex region (also referred to as a stem region) and a loop region. The 3′ end of the sense strand is connected to the 5′ end of the antisense strand by a contiguous sequence of unpaired nucleotides, which will form the loop region. The loop region is typically of a sufficient length to allow the RNA molecule to fold back on itself such that the antisense strand can base pair with the sense strand to form the duplex or stem region. The loop region can comprise from about 3 to about 25, from about 5 to about 15, or from about 8 to about 12 unpaired nucleotides. Such RNA molecules with at least partially self-complementary regions are referred to as “short hairpin RNAs” (shRNAs). In certain embodiments, the RNAi constructs of the invention comprise a shRNA. The length of a single, at least partially self-complementary RNA molecule can be from about 40 nucleotides to about 100 nucleotides, from about 45 nucleotides to about 85 nucleotides, or from about 50 nucleotides to about 60 nucleotides and comprise a duplex region and loop region each having the lengths recited herein.

[0031] In some embodiments, the RNAi constructs of the invention comprise a sense strand and an antisense strand, wherein the antisense strand comprises a region having a sequence that is substantially or fully complementary to a mARC1 messenger RNA (mRNA) sequence. As used herein, a “mARC1 mRNA sequence” refers to any messenger RNA sequence, including allelic variants and splice variants, encoding a mARC1 protein, including mARC1 protein variants or isoforms from any species (e.g. non-human primate, human). The MARC1 gene (also known as MTARC1 or MOSC1) encodes the mitochondrial amidoxime reducing component 1 enzyme (also known as MOCO sulphurase C-terminal domain containing 1 enzyme). In humans, the MARC1 gene is found on chromosome 1 at locus 1q41.

[0032] A mARC1 mRNA sequence also includes the transcript sequence expressed as its complementary DNA (cDNA) sequence. A cDNA sequence refers to the sequence of an mRNA transcript expressed as DNA bases (e.g. guanine, adenine, thymine, and cytosine) rather than RNA bases (e.g. guanine, adenine, uracil, and cytosine). Thus, the antisense strand of the RNAi constructs of the invention may comprise a region having a sequence that is substantially or fully complementary to a target mARC1 mRNA sequence or mARC1 cDNA sequence. A mARC1 mRNA or cDNA sequence can include, but is not limited to, any mARC1 mRNA or cDNA sequences in the Ensembl Genome or National Center for Biotechnology Information (NCBI) databases, such as human sequences: Ensembl transcript no. ENST00000366910.9 (FIG. 1, SEQ ID NO: 1) and NCBI Reference sequence NM_022746.4; cynomolgus monkey sequences: NCBI Reference sequences XR_001490722.1, XR_001490722.1, XR_001490723.1, XR_001490726.1, XR_273285.2, XM_005540901.2, XR_273286.2, XM_005540898.2, and XM_005540899.2; rhesus monkey sequences: NCBI Reference sequences XM_015115809.2, XM_015115815.2, XM_001102192.4, and XM_001102284.3; chimpanzee sequences: NCBI Reference sequences XM_009441519.3, XM_001172926.4, and XM_009441521.3; rat sequences: NCBI Reference sequence XM_017598938.1; and mouse sequences: NCBI Reference sequence XM_006497192.4. In certain embodiments, the mARC1 mRNA sequence is the human transcript set forth in FIG. 1 (SEQ ID NO: 1).

[0033] A region of the antisense strand can be substantially complementary or fully complementary to at least 15 consecutive nucleotides of the mARC1 mRNA sequence. In certain embodiments, the region of the antisense strand comprises a sequence that is substantially complementary to the sequence of at least 15, at least 16, at least 17, at least 18, or at least 19 contiguous nucleotides of a region of the mARC1 mRNA sequence (e.g. a human mARC1 mRNA sequence (SEQ ID NO: 1)) with no more than 1, 2, or 3 mismatches. In related embodiments, the antisense strand comprises a region having a sequence that is substantially complementary to the sequence of at least 15, at least 16, at least 17, at least 18, or at least 19 contiguous nucleotides of a region of the mARC1 mRNA sequence with no more than 1 mismatch. In embodiments in which the sequence of the antisense strand is not fully complementary to the target mARC1 mRNA sequence and contains a mismatch, the mismatch may occur between the target mARC1 mRNA sequence and the nucleotide at position 6 and/or position 8 from the 5′ end of the antisense strand. In some embodiments, the target region of the mARC1 mRNA sequence to which the antisense strand comprises a region of complementarity can range from about 15 to about 30 consecutive nucleotides, from about 16 to about 28 consecutive nucleotides, from about 18 to about 26 consecutive nucleotides, from about 17 to about 24 consecutive nucleotides, from about 19 to about 30 consecutive nucleotides, from about 19 to about 25 consecutive nucleotides, from about 19 to about 23 consecutive nucleotides, or from about 19 to about 21 consecutive nucleotides. In certain embodiments, the region of the antisense strand comprising a sequence that is substantially or fully complementary to a mARC1 mRNA sequence may comprise at least 15 contiguous nucleotides from an antisense sequence listed in Table 1 or Table 2. In other embodiments, the sequence of the antisense strand comprises at least 16, at least 17, at least 18, or at least 19 contiguous nucleotides from an antisense sequence listed in Table 1 or Table 2.

[0034] The sense strand of the RNAi construct typically comprises a sequence that is sufficiently complementary to the sequence of the antisense strand such that the two strands hybridize under physiological conditions to form a duplex region. A “duplex region” refers to the region in two complementary or substantially complementary polynucleotides that form base pairs with one another, either by Watson-Crick base pairing or other hydrogen bonding interaction, to create a duplex between the two polynucleotides. The duplex region of the RNAi construct should be of sufficient length to allow the RNAi construct to enter the RNA interference pathway, e.g. by engaging the Dicer enzyme and/or the RISC complex. For instance, in some embodiments, the duplex region is about 15 to about 30 base pairs in length. Other lengths for the duplex region within this range are also suitable, such as about 15 to about 28 base pairs, about 15 to about 26 base pairs, about 15 to about 24 base pairs, about 15 to about 22 base pairs, about 17 to about 28 base pairs, about 17 to about 26 base pairs, about 17 to about 24 base pairs, about 17 to about 23 base pairs, about 17 to about 21 base pairs, about 19 to about 25 base pairs, about 19 to about 23 base pairs, or about 19 to about 21 base pairs. In certain embodiments, the duplex region is about 17 to about 24 base pairs in length. In other embodiments, the duplex region is about 19 to about 21 base pairs in length. In one embodiment, the duplex region is about 19 base pairs in length. In another embodiment, the duplex region is about 21 base pairs in length.

[0035] For embodiments in which the sense strand and antisense strand are two separate molecules (e.g. RNAi construct comprises an siRNA), the sense strand and antisense strand need not be the same length as the length of the duplex region. For instance, one or both strands may be longer than the duplex region and have one or more unpaired nucleotides or mismatches flanking the duplex region. Thus, in some embodiments, the RNAi construct comprises at least one nucleotide overhang. As used herein, a “nucleotide overhang” refers to the unpaired nucleotide or nucleotides that extend beyond the duplex region at the terminal ends of the strands. Nucleotide overhangs are typically created when the 3′ end of one strand extends beyond the 5′ end of the other strand or when the 5′ end of one strand extends beyond the 3′ end of the other strand. The length of a nucleotide overhang is generally between 1 and 6 nucleotides, 1 and 5 nucleotides, 1 and 4 nucleotides, 1 and 3 nucleotides, 2 and 6 nucleotides, 2 and 5 nucleotides, or 2 and 4 nucleotides. In some embodiments, the nucleotide overhang comprises 1, 2, 3, 4, 5, or 6 nucleotides. In one particular embodiment, the nucleotide overhang comprises 1 to 4 nucleotides. In certain embodiments, the nucleotide overhang comprises 2 nucleotides. In certain other embodiments, the nucleotide overhang comprises a single nucleotide.

[0036] The nucleotides in the overhang can be ribonucleotides or modified nucleotides as described herein. In some embodiments, the nucleotides in the overhang are 2′-modified nucleotides (e.g. 2′-fluoro modified nucleotides, 2′-O-methyl modified nucleotides), deoxyribonucleotides, abasic nucleotides, inverted nucleotides (e.g. inverted abasic nucleotides, inverted deoxyribonucleotides), or combinations thereof. For instance, in one embodiment, the nucleotides in the overhang are deoxyribonucleotides, e.g. deoxythymidine. In another embodiment, the nucleotides in the overhang are 2′-O-methyl modified nucleotides, 2′-fluoro modified nucleotides, 2′-methoxyethyl modified nucleotides, or combinations thereof. In other embodiments, the overhang comprises a 5′-uridine-uridine-3′ (5′-UU-3′) dinucleotide. In such embodiments, the UU dinucleotide may comprise ribonucleotides or modified nucleotides, e.g. 2′-modified nucleotides. In other embodiments, the overhang comprises a 5′-deoxythymidine-deoxythymidine-3′ (5′-dTdT-3′) dinucleotide. When a nucleotide overhang is present in the antisense strand, the nucleotides in the overhang can be complementary to the target gene sequence, form a mismatch with the target gene sequence, or comprise some other sequence (e.g. polypyrimidine or polypurine sequence, such as UU, TT, AA, GG, etc.).

[0037] The nucleotide overhang can be at the 5′ end or 3′ end of one or both strands. For example, in one embodiment, the RNAi construct comprises a nucleotide overhang at the 5′ end and the 3′ end of the antisense strand. In another embodiment, the RNAi construct comprises a nucleotide overhang at the 5′ end and the 3′ end of the sense strand. In some embodiments, the RNAi construct comprises a nucleotide overhang at the 5′ end of the sense strand and the 5′ end of the antisense strand. In other embodiments, the RNAi construct comprises a nucleotide overhang at the 3′ end of the sense strand and the 3′ end of the antisense strand.

[0038] The RNAi constructs may comprise a single nucleotide overhang at one end of the double-stranded RNA molecule and a blunt end at the other. A “blunt end” means that the sense strand and antisense strand are fully base-paired at the end of the molecule and there are no unpaired nucleotides that extend beyond the duplex region. In some embodiments, the RNAi construct comprises a nucleotide overhang at the 3′ end of the sense strand and a blunt end at the 5′ end of the sense strand and 3′ end of the antisense strand. In other embodiments, the RNAi construct comprises a nucleotide overhang at the 3′ end of the antisense strand and a blunt end at the 5′ end of the antisense strand and the 3′ end of the sense strand. In certain embodiments, the RNAi construct comprises a blunt end at both ends of the double-stranded RNA molecule. In such embodiments, the sense strand and antisense strand have the same length and the duplex region is the same length as the sense and antisense strands (i.e. the molecule is double-stranded over its entire length).

[0039] The sense strand and antisense strand in the RNAi constructs of the invention can each independently be about 15 to about 30 nucleotides in length, about 19 to about 30 nucleotides in length, about 18 to about 28 nucleotides in length, about 19 to about 27 nucleotides in length, about 19 to about 25 nucleotides in length, about 19 to about 23 nucleotides in length, about 19 to about 21 nucleotides in length, about 21 to about 25 nucleotides in length, or about 21 to about 23 nucleotides in length. In certain embodiments, the sense strand and antisense strand are each independently about 18, about 19, about 20, about 21, about 22, about 23, about 24, or about 25 nucleotides in length. In some embodiments, the sense strand and antisense strand have the same length but form a duplex region that is shorter than the strands such that the RNAi construct has two nucleotide overhangs. For instance, in one embodiment, the RNAi construct comprises (i) a sense strand and an antisense strand that are each 21 nucleotides in length, (ii) a duplex region that is 19 base pairs in length, and (iii) nucleotide overhangs of 2 unpaired nucleotides at both the 3′ end of the sense strand and the 3′ end of the antisense strand. In another embodiment, the RNAi construct comprises (i) a sense strand and an antisense strand that are each 23 nucleotides in length, (ii) a duplex region that is 21 base pairs in length, and (iii) nucleotide overhangs of 2 unpaired nucleotides at both the 3′ end of the sense strand and the 3′ end of the antisense strand. In other embodiments, the sense strand and antisense strand have the same length and form a duplex region over their entire length such that there are no nucleotide overhangs on either end of the double-stranded molecule. In one such embodiment, the RNAi construct is blunt ended (e.g. has two blunt ends) and comprises (i) a sense strand and an antisense strand, each of which is 21 nucleotides in length, and (ii) a duplex region that is 21 base pairs in length. In another such embodiment, the RNAi construct is blunt ended (e.g. has two blunt ends) and comprises (i) a sense strand and an antisense strand, each of which is 23 nucleotides in length, and (ii) a duplex region that is 23 base pairs in length. In still another such embodiment, the RNAi construct is blunt ended (e.g. has two blunt ends) and comprises (i) a sense strand and an antisense strand, each of which is 19 nucleotides in length, and (ii) a duplex region that is 19 base pairs in length.

[0040] In other embodiments, the sense strand or the antisense strand is longer than the other strand and the two strands form a duplex region having a length equal to that of the shorter strand such that the RNAi construct comprises at least one nucleotide overhang. For example, in one embodiment, the RNAi construct comprises (i) a sense strand that is 19 nucleotides in length, (ii) an antisense strand that is 21 nucleotides in length, (iii) a duplex region of 19 base pairs in length, and (iv) a nucleotide overhang of 2 unpaired nucleotides at the 3′ end of the antisense strand. In another embodiment, the RNAi construct comprises (i) a sense strand that is 21 nucleotides in length, (ii) an antisense strand that is 23 nucleotides in length, (iii) a duplex region of 21 base pairs in length, and (iv) a nucleotide overhang of 2 unpaired nucleotides at the 3′ end of the antisense strand.

[0041] The antisense strand of the RNAi constructs of the invention can comprise or consist of the sequence of any one of the antisense sequences listed in Table 1 or Table 2, the sequence of nucleotides 1-19 of any of these antisense sequences, or the sequence of nucleotides 2-19 of any of these antisense sequences. Thus, in some embodiments, the antisense strand comprises or consists of a sequence selected from SEQ ID NOs: 671-1339, 2072-2803, 2906-3061, or 3321-3655. In other embodiments, the antisense strand comprises or consists of a sequence of nucleotides 1-19 of any one of SEQ ID NOs: 671-1339, 2072-2803, 2906-3061, or 3321-3655. In still other embodiments, the antisense strand comprises or consists of a sequence of nucleotides 2-19 of any one of SEQ ID NOs: 671-1339, 2072-2803, 2906-3061, or 3321-3655. In certain embodiments, the antisense strand comprises or consists of a sequence selected from SEQ ID NO: 715; SEQ ID NO: 725; SEQ ID NO: 732; SEQ ID NO: 733; SEQ ID NO: 737; SEQ ID NO: 738; SEQ ID NO: 739; SEQ ID NO: 745; SEQ ID NO: 754; SEQ ID NO: 757; SEQ ID NO: 758; SEQ ID NO: 761; SEQ ID NO: 762; SEQ ID NO: 763; SEQ ID NO: 764; SEQ ID NO: 766; SEQ ID NO: 767; SEQ ID NO: 768; SEQ ID NO: 770; SEQ ID NO: 782; SEQ ID NO: 784; SEQ ID NO: 801; SEQ ID NO: 809; SEQ ID NO: 810; SEQ ID NO: 811; SEQ ID NO: 814; SEQ ID NO: 818; SEQ ID NO: 821; SEQ ID NO: 837; SEQ ID NO: 841; SEQ ID NO: 842; SEQ ID NO: 845; SEQ ID NO: 847; SEQ ID NO: 848; SEQ ID NO: 850; SEQ ID NO: 851; SEQ ID NO: 855; SEQ ID NO: 856; SEQ ID NO: 860; SEQ ID NO: 861; SEQ ID NO: 862; SEQ ID NO: 865; SEQ ID NO: 875; SEQ ID NO: 884; SEQ ID NO: 886; SEQ ID NO: 891; SEQ ID NO: 899; SEQ ID NO: 901; SEQ ID NO: 907; SEQ ID NO: 914; SEQ ID NO: 916; SEQ ID NO: 920; SEQ ID NO: 927; SEQ ID NO: 937; SEQ ID NO: 1056; SEQ ID NO: 1057; SEQ ID NO: 1058; SEQ ID NO: 1059; SEQ ID NO: 1078; SEQ ID NO: 2917; SEQ ID NO: 2919; SEQ ID NO: 2926; SEQ ID NO: 2946; SEQ ID NO: 2949; SEQ ID NO: 2951; SEQ ID NO: 2953; and SEQ ID NO: 2956. In some embodiments, the antisense strand comprises or consists of a sequence selected from SEQ ID NO: 715; SEQ ID NO: 732; SEQ ID NO: 733; SEQ ID NO: 737; SEQ ID NO: 738; SEQ ID NO: 739; SEQ ID NO: 745; SEQ ID NO: 754; SEQ ID NO: 757; SEQ ID NO: 761; SEQ ID NO: 762; SEQ ID NO: 763; SEQ ID NO: 764; SEQ ID NO: 766; SEQ ID NO: 767; SEQ ID NO: 784; SEQ ID NO: 801; SEQ ID NO: 809; SEQ ID NO: 810; SEQ ID NO: 811; SEQ ID NO: 814; SEQ ID NO: 841; SEQ ID NO: 842; SEQ ID NO: 845; SEQ ID NO: 848; SEQ ID NO: 851; SEQ ID NO: 856; SEQ ID NO: 860; SEQ ID NO: 862; SEQ ID NO: 914; SEQ ID NO: 916; SEQ ID NO: 927; SEQ ID NO: 937; SEQ ID NO: 1056; SEQ ID NO: 1057; SEQ ID NO: 1058; SEQ ID NO: 1059; SEQ ID NO: 1078; SEQ ID NO: 2917; SEQ ID NO: 2919; SEQ ID NO: 2926; SEQ ID NO: 2946; SEQ ID NO: 2949; SEQ ID NO: 2951; SEQ ID NO: 2953; and SEQ ID NO: 2956. In other embodiments, the antisense strand comprises or consists of a sequence selected from SEQ ID NO: 715; SEQ ID NO: 732; SEQ ID NO: 733; SEQ ID NO: 738; SEQ ID NO: 754; SEQ ID NO: 761; SEQ ID NO: 763; SEQ ID NO: 764; SEQ ID NO: 766; SEQ ID NO: 809; SEQ ID NO: 810; SEQ ID NO: 814; SEQ ID NO: 841; SEQ ID NO: 848; SEQ ID NO: 851; SEQ ID NO: 862; SEQ ID NO: 916; SEQ ID NO: 1057; SEQ ID NO: 1078; SEQ ID NO: 2919; SEQ ID NO: 2926; SEQ ID NO: 2946; SEQ ID NO: 2949; SEQ ID NO: 2953; and SEQ ID NO: 2956.

[0042] In these and other embodiments, the sense strand of the RNAi constructs of the invention can comprise or consist of the sequence of any one of the sense sequences listed in Table 1 or Table 2, the sequence of nucleotides 1-19 of any of these sense sequences, or the sequence of nucleotides 2-19 of any of these sense sequences. Thus, in some embodiments, the sense strand comprises or consists of a sequence selected from SEQ ID NOs: 2-670, 1340-2071, 2804-2905, or 3062-3320. In other embodiments, the sense strand comprises or consists of a sequence of nucleotides 1-19 of any one of SEQ ID NOs: 2-670, 1340-2071, 2804-2905, or 3062-3320. In still other embodiments, the sense strand comprises or consists of a sequence of nucleotides 2-19 of any one of SEQ ID NOs: 2-670, 1340-2071, 2804-2905, or 3062-3320. In certain embodiments, the sense strand comprises or consists of a sequence selected from SEQ ID NO: 46; SEQ ID NO: 56; SEQ ID NO: 63; SEQ ID NO: 64; SEQ ID NO: 68; SEQ ID NO: 69; SEQ ID NO: 70; SEQ ID NO: 76; SEQ ID NO: 85; SEQ ID NO: 88; SEQ ID NO: 89; SEQ ID NO: 92; SEQ ID NO: 93; SEQ ID NO: 94; SEQ ID NO: 95; SEQ ID NO: 97; SEQ ID NO: 98; SEQ ID NO: 99; SEQ ID NO: 101; SEQ ID NO: 113; SEQ ID NO: 115; SEQ ID NO: 132; SEQ ID NO: 140; SEQ ID NO: 141; SEQ ID NO: 142; SEQ ID NO: 145; SEQ ID NO: 149; SEQ ID NO: 152; SEQ ID NO: 168; SEQ ID NO: 172; SEQ ID NO: 173; SEQ ID NO: 176; SEQ ID NO: 178; SEQ ID NO: 179; SEQ ID NO: 181; SEQ ID NO: 182; SEQ ID NO: 186; SEQ ID NO: 187; SEQ ID NO: 191; SEQ ID NO: 192; SEQ ID NO: 193; SEQ ID NO: 196; SEQ ID NO: 206; SEQ ID NO: 215; SEQ ID NO: 217; SEQ ID NO: 222; SEQ ID NO: 230; SEQ ID NO: 232; SEQ ID NO: 238; SEQ ID NO: 245; SEQ ID NO: 247; SEQ ID NO: 251; SEQ ID NO: 258; SEQ ID NO: 268; SEQ ID NO: 387; SEQ ID NO: 388; SEQ ID NO: 389; SEQ ID NO: 390; SEQ ID NO: 391; SEQ ID NO: 392; SEQ ID NO: 409; SEQ ID NO: 2808; and SEQ ID NO: 2820. In certain other embodiments, the sense strand comprises or consists of a sequence selected from SEQ ID NO: 46; SEQ ID NO: 63; SEQ ID NO: 64; SEQ ID NO: 68; SEQ ID NO: 69; SEQ ID NO: 70; SEQ ID NO: 76; SEQ ID NO: 85; SEQ ID NO: 88; SEQ ID NO: 92; SEQ ID NO: 93; SEQ ID NO: 94; SEQ ID NO: 95; SEQ ID NO: 97; SEQ ID NO: 98; SEQ ID NO: 115; SEQ ID NO: 132; SEQ ID NO: 140; SEQ ID NO: 141; SEQ ID NO: 142; SEQ ID NO: 145; SEQ ID NO: 172; SEQ ID NO: 173; SEQ ID NO: 176; SEQ ID NO: 179; SEQ ID NO: 182; SEQ ID NO: 187; SEQ ID NO: 191; SEQ ID NO: 193; SEQ ID NO: 245; SEQ ID NO: 247; SEQ ID NO: 258; SEQ ID NO: 268; SEQ ID NO: 387; SEQ ID NO: 388; SEQ ID NO: 389; SEQ ID NO: 390; SEQ ID NO: 391; SEQ ID NO: 392; SEQ ID NO: 409; SEQ ID NO: 2808; and SEQ ID NO: 2820. In yet other embodiments, the sense strand comprises or consists of a sequence selected from SEQ ID NO: 46; SEQ ID NO: 63; SEQ ID NO: 64; SEQ ID NO: 69; SEQ ID NO: 85; SEQ ID NO: 92; SEQ ID NO: 94; SEQ ID NO: 95; SEQ ID NO: 97; SEQ ID NO: 140; SEQ ID NO: 141; SEQ ID NO: 145; SEQ ID NO: 172; SEQ ID NO: 179; SEQ ID NO: 182; SEQ ID NO: 193; SEQ ID NO: 247; SEQ ID NO: 388; SEQ ID NO: 390; SEQ ID NO: 391; SEQ ID NO: 409; SEQ ID NO: 2808; and SEQ ID NO: 2820.

[0043] In certain embodiments of the invention, the RNAi constructs comprise (i) a sense strand comprising or consisting of a sequence selected from 2-670, 1340-2071, 2804-2905, or 3062-3320 and (ii) an antisense strand comprising or consisting of a sequence selected from SEQ ID NOs: 671-1339, 2072-2803, 2906-3061, or 3321-3655. In some embodiments, the RNAi constructs comprise (i) a sense strand comprising or consisting of a sequence selected from SEQ ID NO: 46; SEQ ID NO: 56; SEQ ID NO: 63; SEQ ID NO: 64; SEQ ID NO: 68; SEQ ID NO: 69; SEQ ID NO: 70; SEQ ID NO: 76; SEQ ID NO: 85; SEQ ID NO: 88; SEQ ID NO: 89; SEQ ID NO: 92; SEQ ID NO: 93; SEQ ID NO: 94; SEQ ID NO: 95; SEQ ID NO: 97; SEQ ID NO: 98; SEQ ID NO: 99; SEQ ID NO: 101; SEQ ID NO: 113; SEQ ID NO: 115; SEQ ID NO: 132; SEQ ID NO: 140; SEQ ID NO: 141; SEQ ID NO: 142; SEQ ID NO: 145; SEQ ID NO: 149; SEQ ID NO: 152; SEQ ID NO: 168; SEQ ID NO: 172; SEQ ID NO: 173; SEQ ID NO: 176; SEQ ID NO: 178; SEQ ID NO: 179; SEQ ID NO: 181; SEQ ID NO: 182; SEQ ID NO: 186; SEQ ID NO: 187; SEQ ID NO: 191; SEQ ID NO: 192; SEQ ID NO: 193; SEQ ID NO: 196; SEQ ID NO: 206; SEQ ID NO: 215; SEQ ID NO: 217; SEQ ID NO: 222; SEQ ID NO: 230; SEQ ID NO: 232; SEQ ID NO: 238; SEQ ID NO: 245; SEQ ID NO: 247; SEQ ID NO: 251; SEQ ID NO: 258; SEQ ID NO: 268; SEQ ID NO: 387; SEQ ID NO: 388; SEQ ID NO: 389; SEQ ID NO: 390; SEQ ID NO: 391; SEQ ID NO: 392; SEQ ID NO: 409; SEQ ID NO: 2808; and SEQ ID NO: 2820 and (ii) an antisense strand comprising or consisting of a sequence selected from SEQ ID NO: 715; SEQ ID NO: 725; SEQ ID NO: 732; SEQ ID NO: 733; SEQ ID NO: 737; SEQ ID NO: 738; SEQ ID NO: 739; SEQ ID NO: 745; SEQ ID NO: 754; SEQ ID NO: 757; SEQ ID NO: 758; SEQ ID NO: 761; SEQ ID NO: 762; SEQ ID NO: 763; SEQ ID NO: 764; SEQ ID NO: 766; SEQ ID NO: 767; SEQ ID NO: 768; SEQ ID NO: 770; SEQ ID NO: 782; SEQ ID NO: 784; SEQ ID NO: 801; SEQ ID NO: 809; SEQ ID NO: 810; SEQ ID NO: 811; SEQ ID NO: 814; SEQ ID NO: 818; SEQ ID NO: 821; SEQ ID NO: 837; SEQ ID NO: 841; SEQ ID NO: 842; SEQ ID NO: 845; SEQ ID NO: 847; SEQ ID NO: 848; SEQ ID NO: 850; SEQ ID NO: 851; SEQ ID NO: 855; SEQ ID NO: 856; SEQ ID NO: 860; SEQ ID NO: 861; SEQ ID NO: 862; SEQ ID NO: 865; SEQ ID NO: 875; SEQ ID NO: 884; SEQ ID NO: 886; SEQ ID NO: 891; SEQ ID NO: 899; SEQ ID NO: 901; SEQ ID NO: 907; SEQ ID NO: 914; SEQ ID NO: 916; SEQ ID NO: 920; SEQ ID NO: 927; SEQ ID NO: 937; SEQ ID NO: 1056; SEQ ID NO: 1057; SEQ ID NO: 1058; SEQ ID NO: 1059; SEQ ID NO: 1078; SEQ ID NO: 2917; SEQ ID NO: 2919; SEQ ID NO: 2926; SEQ ID NO: 2946; SEQ ID NO: 2949; SEQ ID NO: 2951; SEQ ID NO: 2953; and SEQ ID NO: 2956. In other embodiments, the RNAi constructs comprise (i) a sense strand comprising or consisting of a sequence selected from SEQ ID NO: 46; SEQ ID NO: 63; SEQ ID NO: 64; SEQ ID NO: 68; SEQ ID NO: 69; SEQ ID NO: 70; SEQ ID NO: 76; SEQ ID NO: 85; SEQ ID NO: 88; SEQ ID NO: 92; SEQ ID NO: 93; SEQ ID NO: 94; SEQ ID NO: 95; SEQ ID NO: 97; SEQ ID NO: 98; SEQ ID NO: 115; SEQ ID NO: 132; SEQ ID NO: 140; SEQ ID NO: 141; SEQ ID NO: 142; SEQ ID NO: 145; SEQ ID NO: 172; SEQ ID NO: 173; SEQ ID NO: 176; SEQ ID NO: 179; SEQ ID NO: 182; SEQ ID NO: 187; SEQ ID NO: 191; SEQ ID NO: 193; SEQ ID NO: 245; SEQ ID NO: 247; SEQ ID NO: 258; SEQ ID NO: 268; SEQ ID NO: 387; SEQ ID NO: 388; SEQ ID NO: 389; SEQ ID NO: 390; SEQ ID NO: 391; SEQ ID NO: 392; SEQ ID NO: 409; SEQ ID NO: 2808; and SEQ ID NO: 2820 and (ii) an antisense strand comprising or consisting of a sequence selected from SEQ ID NO: 715; SEQ ID NO: 732; SEQ ID NO: 733; SEQ ID NO: 737; SEQ ID NO: 738; SEQ ID NO: 739; SEQ ID NO: 745; SEQ ID NO: 754; SEQ ID NO: 757; SEQ ID NO: 761; SEQ ID NO: 762; SEQ ID NO: 763; SEQ ID NO: 764; SEQ ID NO: 766; SEQ ID NO: 767; SEQ ID NO: 784; SEQ ID NO: 801; SEQ ID NO: 809; SEQ ID NO: 810; SEQ ID NO: 811; SEQ ID NO: 814; SEQ ID NO: 841; SEQ ID NO: 842; SEQ ID NO: 845; SEQ ID NO: 848; SEQ ID NO: 851; SEQ ID NO: 856; SEQ ID NO: 860; SEQ ID NO: 862; SEQ ID NO: 914; SEQ ID NO: 916; SEQ ID NO: 927; SEQ ID NO: 937; SEQ ID NO: 1056; SEQ ID NO: 1057; SEQ ID NO: 1058; SEQ ID NO: 1059; SEQ ID NO: 1078; SEQ ID NO: 2917; SEQ ID NO: 2919; SEQ ID NO: 2926; SEQ ID NO: 2946; SEQ ID NO: 2949; SEQ ID NO: 2951; SEQ ID NO: 2953; and SEQ ID NO: 2956. In still other embodiments, the RNAi constructs comprise (i) a sense strand comprising or consisting of a sequence selected from SEQ ID NO: 46; SEQ ID NO: 63; SEQ ID NO: 64; SEQ ID NO: 69; SEQ ID NO: 85; SEQ ID NO: 92; SEQ ID NO: 94; SEQ ID NO: 95; SEQ ID NO: 97; SEQ ID NO: 140; SEQ ID NO: 141; SEQ ID NO: 145; SEQ ID NO: 172; SEQ ID NO: 179; SEQ ID NO: 182; SEQ ID NO: 193; SEQ ID NO: 247; SEQ ID NO: 388; SEQ ID NO: 390; SEQ ID NO: 391; SEQ ID NO: 409; SEQ ID NO: 2808; and SEQ ID NO: 2820 and (ii) an antisense strand comprising or consisting of a sequence selected from SEQ ID NO: 715; SEQ ID NO: 732; SEQ ID NO: 733; SEQ ID NO: 738; SEQ ID NO: 754; SEQ ID NO: 761; SEQ ID NO: 763; SEQ ID NO: 764; SEQ ID NO: 766; SEQ ID NO: 809; SEQ ID NO: 810; SEQ ID NO: 814; SEQ ID NO: 841; SEQ ID NO: 848; SEQ ID NO: 851; SEQ ID NO: 862; SEQ ID NO: 916; SEQ ID NO: 1057; SEQ ID NO: 1078; SEQ ID NO: 2919; SEQ ID NO: 2926; SEQ ID NO: 2946; SEQ ID NO: 2949; SEQ ID NO: 2953; and SEQ ID NO: 2956.

[0044] In certain embodiments, the RNAi constructs of the invention comprise: (i) a sense strand comprising or consisting of the sequence of SEQ ID NO: 46 and an antisense strand comprising or consisting of the sequence of SEQ ID NO: 715; (ii) a sense strand comprising or consisting of the sequence of SEQ ID NO: 63 and an antisense strand comprising or consisting of the sequence of SEQ ID NO: 732; (iii) a sense strand comprising or consisting of the sequence of SEQ ID NO: 64 and an antisense strand comprising or consisting of the sequence of SEQ ID NO: 733; (iv) a sense strand comprising or consisting of the sequence of SEQ ID NO: 69 and an antisense strand comprising or consisting of the sequence of SEQ ID NO: 738; (v) a sense strand comprising or consisting of the sequence of SEQ ID NO: 85 and an antisense strand comprising or consisting of the sequence of SEQ ID NO: 754; (vi) a sense strand comprising or consisting of the sequence of SEQ ID NO: 92 and an antisense strand comprising or consisting of the sequence of SEQ ID NO: 761; (vii) a sense strand comprising or consisting of the sequence of SEQ ID NO: 94 and an antisense strand comprising or consisting of the sequence of SEQ ID NO: 763; (viii) a sense strand comprising or consisting of the sequence of SEQ ID NO: 95 and an antisense strand comprising or consisting of the sequence of SEQ ID NO: 764; (ix) a sense strand comprising or consisting of the sequence of SEQ ID NO: 97 and an antisense strand comprising or consisting of the sequence of SEQ ID NO: 766; (x) a sense strand comprising or consisting of the sequence of SEQ ID NO: 140 and an antisense strand comprising or consisting of the sequence of SEQ ID NO: 809; (xi) a sense strand comprising or consisting of the sequence of SEQ ID NO: 141 and an antisense strand comprising or consisting of the sequence of SEQ ID NO: 810; (xii) a sense strand comprising or consisting of the sequence of SEQ ID NO: 145 and an antisense strand comprising or consisting of the sequence of SEQ ID NO: 814; (xiii) a sense strand comprising or consisting of the sequence of SEQ ID NO: 172 and an antisense strand comprising or consisting of the sequence of SEQ ID NO: 841; (xiv) a sense strand comprising or consisting of the sequence of SEQ ID NO: 179 and an antisense strand comprising or consisting of the sequence of SEQ ID NO: 848; (xv) a sense strand comprising or consisting of the sequence of SEQ ID NO: 182 and an antisense strand comprising or consisting of the sequence of SEQ ID NO: 851; (xvi) a sense strand comprising or consisting of the sequence of SEQ ID NO: 193 and an antisense strand comprising or consisting of the sequence of SEQ ID NO: 862; or (xvii) a sense strand comprising or consisting of the sequence of SEQ ID NO: 247 and an antisense strand comprising or consisting of the sequence of SEQ ID NO: 916.

[0045] In certain other embodiments, the RNAi constructs of the invention comprise: (i) a sense strand comprising or consisting of the sequence of SEQ ID NO: 409 and an antisense strand comprising or consisting of the sequence of SEQ ID NO: 1078; (ii) a sense strand comprising or consisting of the sequence of SEQ ID NO: 388 and an antisense strand comprising or consisting of the sequence of SEQ ID NO: 1057; (iii) a sense strand comprising or consisting of the sequence of SEQ ID NO: 2808 and an antisense strand comprising or consisting of the sequence of SEQ ID NO: 2926; (iv) a sense strand comprising or consisting of the sequence of SEQ ID NO: 2820 and an antisense strand comprising or consisting of the sequence of SEQ ID NO: 2946; (v) a sense strand comprising or consisting of the sequence of SEQ ID NO: 391 and an antisense strand comprising or consisting of the sequence of SEQ ID NO: 2949; (vi) a sense strand comprising or consisting of the sequence of SEQ ID NO: 390 and an antisense strand comprising or consisting of the sequence of SEQ ID NO: 2956; (vii) a sense strand comprising or consisting of the sequence of SEQ ID NO: 179 and an antisense strand comprising or consisting of the sequence of SEQ ID NO: 2919; (viii) a sense strand comprising or consisting of the sequence of SEQ ID NO: 388 and an antisense strand comprising or consisting of the sequence of SEQ ID NO: 2953; or (ix) a sense strand comprising or consisting of the sequence of SEQ ID NO: 388 and an antisense strand comprising or consisting of the sequence of SEQ ID NO: 1057.

[0046] In some embodiments, the RNAi constructs of the invention comprise: (i) a sense strand comprising or consisting of the sequence of modified nucleotides according to SEQ ID NO: 2009 and an antisense strand comprising or consisting of the sequence of modified nucleotides according to SEQ ID NO: 2741; (ii) a sense strand comprising or consisting of the sequence of modified nucleotides according to SEQ ID NO: 2011 and an antisense strand comprising or consisting of the sequence of modified nucleotides according to SEQ ID NO: 2743; (iii) a sense strand comprising or consisting of the sequence of modified nucleotides according to SEQ ID NO: 2012 and an antisense strand comprising or consisting of the sequence of modified nucleotides according to SEQ ID NO: 2744; (iv) a sense strand comprising or consisting of the sequence of modified nucleotides according to SEQ ID NO: 2013 and an antisense strand comprising or consisting of the sequence of modified nucleotides according to SEQ ID NO: 2745; (v) a sense strand comprising or consisting of the sequence of modified nucleotides according to SEQ ID NO: 2020 and an antisense strand comprising or consisting of the sequence of modified nucleotides according to SEQ ID NO: 2752; (vi) a sense strand comprising or consisting of the sequence of modified nucleotides according to SEQ ID NO: 2035 and an antisense strand comprising or consisting of the sequence of modified nucleotides according to SEQ ID NO: 2767; (vii) a sense strand comprising or consisting of the sequence of modified nucleotides according to SEQ ID NO: 2037 and an antisense strand comprising or consisting of the sequence of modified nucleotides according to SEQ ID NO: 2769; (viii) a sense strand comprising or consisting of the sequence of modified nucleotides according to SEQ ID NO: 2041 and an antisense strand comprising or consisting of the sequence of modified nucleotides according to SEQ ID NO: 2773; (ix) a sense strand comprising or consisting of the sequence of modified nucleotides according to SEQ ID NO: 2042 and an antisense strand comprising or consisting of the sequence of modified nucleotides according to SEQ ID NO: 2774; (x) a sense strand comprising or consisting of the sequence of modified nucleotides according to SEQ ID NO: 2043 and an antisense strand comprising or consisting of the sequence of modified nucleotides according to SEQ ID NO: 2775; (xi) a sense strand comprising or consisting of the sequence of modified nucleotides according to SEQ ID NO: 2044 and an antisense strand comprising or consisting of the sequence of modified nucleotides according to SEQ ID NO: 2776; (xii) a sense strand comprising or consisting of the sequence of modified nucleotides according to SEQ ID NO: 2045 and an antisense strand comprising or consisting of the sequence of modified nucleotides according to SEQ ID NO: 2777; (xiii) a sense strand comprising or consisting of the sequence of modified nucleotides according to SEQ ID NO: 2051 and an antisense strand comprising or consisting of the sequence of modified nucleotides according to SEQ ID NO: 2783; (xiv) a sense strand comprising or consisting of the sequence of modified nucleotides according to SEQ ID NO: 2053 and an antisense strand comprising or consisting of the sequence of modified nucleotides according to SEQ ID NO: 2785; (xv) a sense strand comprising or consisting of the sequence of modified nucleotides according to SEQ ID NO: 2054 and an antisense strand comprising or consisting of the sequence of modified nucleotides according to SEQ ID NO: 2786; (xvi) a sense strand comprising or consisting of the sequence of modified nucleotides according to SEQ ID NO: 2055 and an antisense strand comprising or consisting of the sequence of modified nucleotides according to SEQ ID NO: 2787; or (xvii) a sense strand comprising or consisting of the sequence of modified nucleotides according to SEQ ID NO: 2059 and an antisense strand comprising or consisting of the sequence of modified nucleotides according to SEQ ID NO: 2791.

[0047] In other embodiments, the RNAi constructs of the invention comprise: (i) a sense strand comprising or consisting of the sequence of modified nucleotides according to SEQ ID NO: 3078 and an antisense strand comprising or consisting of the sequence of modified nucleotides according to SEQ ID NO: 3337; (ii) a sense strand comprising or consisting of the sequence of modified nucleotides according to SEQ ID NO: 3080 and an antisense strand comprising or consisting of the sequence of modified nucleotides according to SEQ ID NO: 3339; (iii) a sense strand comprising or consisting of the sequence of modified nucleotides according to SEQ ID NO: 3163 and an antisense strand comprising or consisting of the sequence of modified nucleotides according to SEQ ID NO: 3441; (iv) a sense strand comprising or consisting of the sequence of modified nucleotides according to SEQ ID NO: 3183 and an antisense strand comprising or consisting of the sequence of modified nucleotides according to SEQ ID NO: 3469; (v) a sense strand comprising or consisting of the sequence of modified nucleotides according to SEQ ID NO: 3076 and an antisense strand comprising or consisting of the sequence of modified nucleotides according to SEQ ID NO: 3472; (vi) a sense strand comprising or consisting of the sequence of modified nucleotides according to SEQ ID NO: 3077 and an antisense strand comprising or consisting of the sequence of modified nucleotides according to SEQ ID NO: 3484; (vii) a sense strand comprising or consisting of the sequence of modified nucleotides according to SEQ ID NO: 2051 and an antisense strand comprising or consisting of the sequence of modified nucleotides according to SEQ ID NO: 3545; (viii) a sense strand comprising or consisting of the sequence of modified nucleotides according to SEQ ID NO: 3080 and an antisense strand comprising or consisting of the sequence of modified nucleotides according to SEQ ID NO: 3481; (ix) a sense strand comprising or consisting of the sequence of modified nucleotides according to SEQ ID NO: 3188 and an antisense strand comprising or consisting of the sequence of modified nucleotides according to SEQ ID NO: 3339; (x) a sense strand comprising or consisting of the sequence of modified nucleotides according to SEQ ID NO: 3080 and an antisense strand comprising or consisting of the sequence of modified nucleotides according to SEQ ID NO: 3476; or (xi) a sense strand comprising or consisting of the sequence of modified nucleotides according to SEQ ID NO: 3223 and an antisense strand comprising or consisting of the sequence of modified nucleotides according to SEQ ID NO: 3517.

[0048] The RNAi construct of the invention can be any of the duplex compounds listed in Tables 1 to 24 (including the unmodified nucleotide sequences and/or modified nucleotide sequences of the compounds). In some embodiments, the RNAi construct is any of the duplex compounds listed in Table 1. In other embodiments, the RNAi construct is any of the duplex compounds listed in Table 2 (including the unmodified nucleotide sequences and/or modified nucleotide sequences of the compounds). In certain embodiments, the RNAi construct is D-1044, D-1061, D-1062, D-1067, D-1083, D-1090, D-1092, D-1093, D-1095, D-1138, D-1139, D-1143, D-1170, D-1177, D-1180, D-1191, D-1245, D-2000, D-2002, D-2003, D-2004, D-2011, D-2026, D-2028, D-2032, D-2033, D-2034, D-2035, D-2036, D-2042, D-2044, D-2045, D-2046, D-2050, D-2078, D-2079, D-2081, D-2182, D-2196, D-2238, D-2241, D-2243, D-2246, D-2255, D-2258, D-2301, D-2316, D-2317, D-2329, D-2332, D-2341, D-2344, D-2356, D-2357, D-2399, or D-2510. In certain other embodiments, the RNAi construct is D-2079, D-2081, D-2196, D-2238, D-2241, D-2255, D-2258, D-2317, D-2332, D-2357, or D-2399.

[0049] In certain embodiments, the RNAi constructs of the invention may target a particular region of the human mARC1 transcript sequence. As described in Example 4 and summarized in Table 23, it was found that certain RNAi constructs with antisense strands designed to have a sequence complementary to certain regions of the human mARC1 transcript (SEQ ID NO: 1) exhibited superior in vivo knockdown activity of human mARC1 mRNA as compared to RNAi constructs with antisense strands complementary to other regions of the transcript. Thus, in some embodiments of the invention, RNAi constructs that are particularly suitable for inhibiting expression of a human MARC1 gene in a cell comprise a sense strand and an antisense strand that hybridize to form a duplex region of about 15 to about 30 base pairs in length, wherein the antisense strand comprises a region having a sequence that is substantially complementary to the sequence of at least 15 contiguous nucleotides of nucleotides 1205 to 1250 of SEQ ID NO: 1. In one embodiment, the antisense strand comprises a region having a sequence that is substantially complementary to the sequence of at least 15 contiguous nucleotides of nucleotides 1209 to 1239 of SEQ ID NO: 1. In another embodiment, the antisense strand comprises a region having a sequence that is substantially complementary to the sequence of at least 15 contiguous nucleotides of nucleotides 1211 to 1236 of SEQ ID NO: 1. In some such embodiments, the antisense strand has a sequence that is substantially complementary with no more than 1, 2, or 3 mismatches to the sequence of at least 15 contiguous nucleotides of nucleotides 1205 to 1250, nucleotides 1209 to 1239, or nucleotides 1211 to 1236 of SEQ ID NO: 1. In other embodiments, the antisense strand has a sequence that is fully complementary to the sequence of at least 15 contiguous nucleotides of nucleotides 1205 to 1250, nucleotides 1209 to 1239, or nucleotides 1211 to 1236 of SEQ ID NO: 1. RNAi constructs targeting nucleotides 1205 to 1250 of the human mARC1 transcript include, but are not limited to, D-2063, D-2066, D-2076, D-2077, D-2078, D-2080, D-2081, D-2108, D-2113, D-2142, D-2240, D-2241, D-2243, D-2245, D-2246, D-2248, D-2250, D-2251, D-2253, D-2255, D-2256, D-2258, D-2259, D-2261, D-2264, D-2265, D-2268, D-2269, D-2270, D-2271, D-2301, D-2309, D-2311, D-2312, D-2314, D-2316, D-2317, D-2319, D-2321, D-2322, D-2324, D-2326, D-2327, D-2329, D-2331, D-2332, D-2334, D-2336, D-2337, D-2339, D-2341, D-2342, D-2344, D-2346, D-2347, D-2349, D-2351, D-2352, D-2354, D-2356, D-2357, D-2376, D-2380, D-2393, D-2395, D-2396, D-2431, D-2436, D-2437, D-2440, D-2441, D-2444, D-2445, D-2447, D-2453, D-2518, D-2519, D-2520, D-2521, D-2522, D-2523, D-2524, D-2525, D-2526, D-2527, D-2528, D-2529, D-2530, D-2531, D-2532, D-2533, D-2534, and D-2535. In some embodiments, the RNAi construct targeting nucleotides 1205 to 1250 of the human mARC1 transcript is D-2063, D-2066, D-2076, D-2077, D-2078, D-2080, D-2081, D-2108, D-2113, D-2142, or D-2301. In certain embodiments, RNAi constructs targeting nucleotides 1205 to 1250, particularly nucleotides 1211 to 1236, of SEQ ID NO: 1 comprise an antisense strand comprising the sequence of 5′-CAUCUAAUAUUCCAG-3′ (SEQ ID NO: 3656).

[0050] In other embodiments, the RNAi constructs of the invention comprise a sense strand and an antisense strand that hybridize to form a duplex region of about 15 to about 30 base pairs in length, wherein the antisense strand comprises a region having a sequence that is substantially complementary to the sequence of at least 15 contiguous nucleotides of nucleotides 1345 to 1375 of SEQ ID NO: 1. In one embodiment, the antisense strand comprises a sequence that is substantially complementary with no more than 1, 2, or 3 mismatches to the sequence of at least 15 contiguous nucleotides of nucleotides 1345 to 1375 of SEQ ID NO: 1. In another embodiment, the antisense strand comprises a sequence that is fully complementary to the sequence of at least 15 contiguous nucleotides of nucleotides 1345 to 1375 of SEQ ID NO: 1. Exemplary RNAi constructs targeting nucleotides 1345 to 1375 of the human mARC1 transcript include, but are not limited to, D-2042, D-2043, D-2047, D-2052, D-2158, D-2162, D-2169, D-2182, D-2183, D-2184, D-2185, D-2186, D-2187, D-2189, D-2211, D-2213, D-2304, D-2305, D-2306, D-2307, D-2308, D-2384, D-2384, D-2385, D-2386, D-2387, D-2388, D-2389, D-2390, D-2391, D-2392, D-2399, D-2400, D-2401, D-2402, D-2403, D-2488, D-2494, D-2500, D-2506, D-2512, D-2538, D-2539, D-2540, and D-2541. In some embodiments, the RNAi construct targeting nucleotides 1345 to 1375 of the human mARC1 transcript is D-2042, D-2043, D-2047, D-2052, D-2304, D-2305, D-2306, D-2307, or D-2308. In certain embodiments, RNAi constructs targeting nucleotides 1345 to 1375, particularly nucleotides 1350 to 1375, of SEQ ID NO: 1 comprise an antisense strand comprising the sequence of 5′-UGGGACAUUGAAGCA-3′ (SEQ ID NO: 3657).

[0051] In still other embodiments, RNAi constructs of the invention comprise a sense strand and an antisense strand that hybridize to form a duplex region of about 15 to about 30 base pairs in length, wherein the antisense strand comprises a region having a sequence that is substantially complementary to the sequence of at least 15 contiguous nucleotides of nucleotides 2039 to 2078 of SEQ ID NO: 1. In one embodiment, the antisense strand comprises a region having a sequence that is substantially complementary to the sequence of at least 15 contiguous nucleotides of nucleotides 2048 to 2074 of SEQ ID NO: 1. In some such embodiments, the antisense strand has a sequence that is substantially complementary with no more than 1, 2, or 3 mismatches to the sequence of at least 15 contiguous nucleotides of nucleotides 2039 to 2078 or nucleotides 2048 to 2074 of SEQ ID NO: 1. In other embodiments, the antisense strand has a sequence that is fully complementary to the sequence of at least 15 contiguous nucleotides of nucleotides 2039 to 2078 or nucleotides 2048 to 2074 of SEQ ID NO: 1. RNAi constructs targeting nucleotides 2039 to 2078 of the human mARC1 transcript include, but are not limited to, D-2045, D-2065, D-2079, D-2082, D-2105, D-2106, D-2137, D-2143, D-2166, D-2173, D-2193, D-2242, D-2247, D-2252, D-2257, D-2260, D-2262, D-2266, D-2272, D-2273, D-2302, D-2303, D-2310, D-2313, D-2315, D-2318, D-2320, D-2323, D-2325, D-2328, D-2330, D-2333, D-2335, D-2338, D-2340, D-2343, D-2345, D-2348, D-2350, D-2353, D-2355, D-2358, D-2394, D-2397, D-2454, D-2455, D-2456, D-2457, D-2458, D-2459, D-2460, D-2463, D-2465, D-2465, D-2468, D-2470, D-2472, D-2473, D-2477, D-2487, D-2493, D-2499, D-2505, D-2511, D-2552, D-2553, D-2554, D-2555, D-2556, and D-2557. In certain embodiments, the RNAi construct targeting nucleotides 2039 to 2078 of the human mARC1 transcript is D-2045, D-2065, D-2079, D-2082, D-2105, D-2106, D-2137, D-2143, D-2302, or D-2303. In certain other embodiments, RNAi constructs targeting nucleotides 2039 to 2078, particularly nucleotides 2048 to 2074, of SEQ ID NO: 1 comprise an antisense strand comprising the sequence of 5′-AUCAGAUCUUAGAGU-3′ (SEQ ID NO: 3658).

[0052] The RNAi constructs of the invention may comprise one or more modified nucleotides. A “modified nucleotide” refers to a nucleotide that has one or more chemical modifications to the nucleoside, nucleobase, pentose ring, or phosphate group. As used herein, modified nucleotides do not encompass ribonucleotides containing adenosine monophosphate, guanosine monophosphate, uridine monophosphate, and cytidine monophosphate. However, the RNAi constructs may comprise combinations of modified nucleotides and ribonucleotides. Incorporation of modified nucleotides into one or both strands of double-stranded RNA molecules can improve the in vivo stability of the RNA molecules, e.g., by reducing the molecules' susceptibility to nucleases and other degradation processes. The potency of RNAi constructs for reducing expression of the target gene can also be enhanced by incorporation of modified nucleotides.

[0053] In certain embodiments, the modified nucleotides have a modification of the ribose sugar. These sugar modifications can include modifications at the 2′ and/or 5′ position of the pentose ring as well as bicyclic sugar modifications. A 2′-modified nucleotide refers to a nucleotide having a pentose ring with a substituent at the 2′ position other than OH. Such 2′-modifications include, but are not limited to, 2′-H (e.g. deoxyribonucleotides), 2′-O-alkyl (e.g. —O—C₁-C₁₀ or —O—C₁-C₁₀ substituted alkyl), 2′-O-allyl (—O—CH₂CH═CH₂), 2′-C-allyl, 2′-deoxy-2′-fluoro (also referred to as 2′-F or 2′-fluoro), 2′-O-methyl (—OCH₃), 2′-O-methoxyethyl (—O—(CH₂)₂OCH₃), 2′-OCF₃, 2′-O(CH₂)₂SCH₃, 2′-O-aminoalkyl, 2′-amino (e.g. —NH₂), 2′-O-ethylamine, and 2′-azido. Modifications at the 5′ position of the pentose ring include, but are not limited to, 5′-methyl (R or S configuration); 5′-vinyl, and 5′-methoxy.

[0054] A “bicyclic sugar modification” refers to a modification of the pentose ring where a bridge connects two atoms of the ring to form a second ring resulting in a bicyclic sugar structure. In some embodiments the bicyclic sugar modification comprises a bridge between the 4′ and 2′ carbons of the pentose ring. Nucleotides comprising a sugar moiety with a bicyclic sugar modification are referred to herein as bicyclic nucleic acids or BNAs. Exemplary bicyclic sugar modifications include, but are not limited to, α-L-Methyleneoxy (4′-CH₂—O-2′) bicyclic nucleic acid (BNA); β-D-Methyleneoxy (4′-CH₂—O-2′) BNA (also referred to as a locked nucleic acid or LNA); Ethyleneoxy (4′-(CH₂)₂—O-2′) BNA; Aminooxy (4′-CH₂—O—N(R)-2′, wherein R is H, C₁-C₁₂ alkyl, or a protecting group) BNA; Oxyamino (4′-CH₂—N(R)—O-2′, wherein R is H, C₁-C₁₂ alkyl, or a protecting group) BNA; Methyl(methyleneoxy) (4′-CH(CH₃)—O-2′) BNA (also referred to as constrained ethyl or cEt); methylene-thio (4′-CH₂—S-2′) BNA; methylene-amino (4′-CH2-N(R)-2′, wherein R is H, C₁-C₁₂ alkyl, or a protecting group) BNA; methyl carbocyclic (4′-CH₂—CH(CH₃)-2′) BNA; propylene carbocyclic (4′-(CH₂)₃-2′) BNA; and Methoxy(ethyleneoxy) (4′-CH(CH₂OMe)-O-2′) BNA (also referred to as constrained MOE or cMOE). These and other sugar-modified nucleotides that can be incorporated into the RNAi constructs of the invention are described in U.S. Pat. No. 9,181,551, U.S. Patent Publication No. 2016/0122761, and Deleavey and Damha, Chemistry and Biology, Vol. 19: 937-954, 2012, all of which are hereby incorporated by reference in their entireties.

[0055] In some embodiments, the RNAi constructs comprise one or more 2′-fluoro modified nucleotides, 2′-O-methyl modified nucleotides, 2′-O-methoxyethyl modified nucleotides, 2′-O-alkyl modified nucleotides, 2′-O-allyl modified nucleotides, bicyclic nucleic acids (BNAs), deoxyribonucleotides, or combinations thereof. In certain embodiments, the RNAi constructs comprise one or more 2′-fluoro modified nucleotides, 2′-O-methyl modified nucleotides, 2′-O-methoxyethyl modified nucleotides, or combinations thereof. In one particular embodiment, the RNAi constructs comprise one or more 2′-fluoro modified nucleotides, 2′-O-methyl modified nucleotides or combinations thereof.

[0056] Both the sense and antisense strands of the RNAi constructs can comprise one or multiple modified nucleotides. For instance, in some embodiments, the sense strand comprises 1, 2, 3, 4, 5, 6, 7, 8, 9, 10 or more modified nucleotides. In certain embodiments, all nucleotides in the sense strand are modified nucleotides. In some embodiments, the antisense strand comprises 1, 2, 3, 4, 5, 6, 7, 8, 9, 10 or more modified nucleotides. In other embodiments, all nucleotides in the antisense strand are modified nucleotides. In certain other embodiments, all nucleotides in the sense strand and all nucleotides in the antisense strand are modified nucleotides. In these and other embodiments, the modified nucleotides can be 2′-fluoro modified nucleotides, 2′-O-methyl modified nucleotides, or combinations thereof.

[0057] In certain embodiments, the modified nucleotides incorporated into one or both of the strands of the RNAi constructs of the invention have a modification of the nucleobase (also referred to herein as “base”). A “modified nucleobase” or “modified base” refers to a base other than the naturally occurring purine bases adenine (A) and guanine (G) and pyrimidine bases thymine (T), cytosine (C), and uracil (U). Modified nucleobases can be synthetic or naturally occurring modifications and include, but are not limited to, universal bases, 5-methylcytosine (5-me-C), 5-hydroxymethyl cytosine, xanthine (X), hypoxanthine (I), 2-aminoadenine, 6-methyladenine, 6-methylguanine, and other alkyl derivatives of adenine and guanine, 2-propyl and other alkyl derivatives of adenine and guanine, 2-thiouracil, 2-thiothymine and 2-thiocytosine, 5-halouracil and cytosine, 5-propynyl uracil and cytosine, 6-azo uracil, cytosine and thymine, 5-uracil (pseudouracil), 4-thiouracil, 8-halo, 8-amino, 8-thiol, 8-thioalkyl, 8-hydroxyl and other 8-substituted adenines and guanines, 5-halo, particularly 5-bromo, 5-trifluoromethyl and other 5-substituted uracils and cytosines, 7-methylguanine and 7-methyladenine, 8-azaguanine and 8-azaadenine, 7-deazaguanine and 7-deazaadenine and 3-deazaguanine and 3-deazaadenine.

[0058] In some embodiments, the modified base is a universal base. A “universal base” refers to a base analog that indiscriminately forms base pairs with all of the natural bases in RNA and DNA without altering the double helical structure of the resulting duplex region. Universal bases are known to those of skill in the art and include, but are not limited to, inosine, C-phenyl, C-naphthyl and other aromatic derivatives, azole carboxamides, and nitroazole derivatives, such as 3-nitropyrrole, 4-nitroindole, 5-nitroindole, and 6-nitroindole.

[0059] Other suitable modified bases that can be incorporated into the RNAi constructs of the invention include those described in Herdewijn, Antisense Nucleic Acid Drug Dev., Vol. 10: 297-310, 2000 and Peacock et al., J. Org. Chem., Vol. 76: 7295-7300, 2011, both of which are hereby incorporated by reference in their entireties. The skilled person is well aware that guanine, cytosine, adenine, thymine, and uracil may be replaced by other nucleobases, such as the modified nucleobases described above, without substantially altering the base pairing properties of a polynucleotide comprising a nucleotide bearing such replacement nucleobase.

[0060] In some embodiments, the sense and antisense strands of the RNAi constructs may comprise one or more abasic nucleotides. An “abasic nucleotide” or “abasic nucleoside” is a nucleotide or nucleoside that lacks a nucleobase at the 1′ position of the ribose sugar. In certain embodiments, the abasic nucleotides are incorporated into the terminal ends of the sense and/or antisense strands of the RNAi constructs. In one embodiment, the sense strand comprises an abasic nucleotide as the terminal nucleotide at its 3′ end, its 5′ end, or both its 3′ and 5′ ends. In another embodiment, the antisense strand comprises an abasic nucleotide as the terminal nucleotide at its 3′ end, its 5′ end, or both its 3′ and 5′ ends. In such embodiments in which the abasic nucleotide is a terminal nucleotide, it may be an inverted nucleotide—that is, linked to the adjacent nucleotide through a 3′-3′ internucleotide linkage (when on the 3′ end of a strand) or through a 5′-5′ internucleotide linkage (when on the 5′ end of a strand) rather than the natural 3′-5′ internucleotide linkage. Abasic nucleotides may also comprise a sugar modification, such as any of the sugar modifications described above. In certain embodiments, abasic nucleotides comprise a 2′-modification, such as a 2′-fluoro modification, 2′-O-methyl modification, or a 2′-H (deoxy) modification. In one embodiment, the abasic nucleotide comprises a 2′-O-methyl modification. In another embodiment, the abasic nucleotide comprises a 2′-H modification (i.e. a deoxy abasic nucleotide).

[0061] In certain embodiments, the RNAi constructs of the invention may comprise modified nucleotides incorporated into the sense and anti sense strands according to a particular pattern, such as the patterns described in WIPO Publication No. WO 2020/123410, which is hereby incorporated by reference in its entirety. RNAi constructs having such chemical modification patterns have been shown to have improved gene silencing activity in vivo. In one embodiment, the RNAi construct of the invention comprises a sense strand and an antisense strand that comprise sequences that are sufficiently complementary to each other to form a duplex region of at least 15 base pairs, wherein:
[0062] nucleotides at positions 2, 7, and 14 in the antisense strand (counting from the 5′ end) are 2′-fluoro modified nucleotides;
[0063] nucleotides in the sense strand at positions paired with positions 8 to 11 and 13 in the antisense strand (counting from the 5′ end) are 2′-fluoro modified nucleotides; and
[0064] neither the sense strand nor the antisense strand each have more than 7 total 2′-fluoro modified nucleotides.

[0065] In other embodiments, the RNAi construct of the invention comprises a sense strand and an antisense strand that comprise sequences that are sufficiently complementary to each other to form a duplex region of at least 19 base pairs, wherein:
[0066] nucleotides at positions 2, 7, and 14 in the antisense strand (counting from the 5′ end) are 2′-fluoro modified nucleotides, nucleotides at positions 4, 6, 10, and 12 (counting from the 5′ end) are optionally 2′-fluoro modified nucleotides, and all other nucleotides in the antisense strand are modified nucleotides other than 2′-fluoro modified nucleotides; and
[0067] nucleotides in the sense strand at positions paired with positions 8 to 11 and 13 in the antisense strand (counting from the 5′ end) are 2′-fluoro modified nucleotides, nucleotides in the sense strand at positions paired with positions 3 and 5 in the antisense strand (counting from the 5′ end) are optionally 2′-fluoro modified nucleotides; and all other nucleotides in the sense strand are modified nucleotides other than 2′-fluoro modified nucleotides.

[0068] In such embodiments, the modified nucleotides other than 2′-fluoro modified nucleotides can be selected from 2′-O-methyl modified nucleotides, 2′-O-methoxyethyl modified nucleotides, 2′-O-alkyl modified nucleotides, 2′-O-allyl modified nucleotides, BNAs, and deoxyribonucleotides. In these and other embodiments, the terminal nucleotide at the 3′ end, the 5′ end, or both the 3′ end and the 5′ end of the sense strand can be an abasic nucleotide or a deoxyribonucleotide. In such embodiments, the abasic nucleotide or deoxyribonucleotide may be inverted—i.e. linked to the adjacent nucleotide through a 3′-3′ internucleotide linkage (when on the 3′ end of a strand) or through a 5′-5′ internucleotide linkage (when on the 5′ end of a strand) rather than the natural 3′-5′ internucleotide linkage.

[0069] In any of the above-described embodiments, nucleotides at positions 2, 7, 12, and 14 in the antisense strand (counting from the 5′ end) are 2′-fluoro modified nucleotides. In other embodiments, nucleotides at positions 2, 4, 7, 12, and 14 in the antisense strand (counting from the 5′ end) are 2′-fluoro modified nucleotides. In yet other embodiments, nucleotides at positions 2, 4, 6, 7, 12, and 14 in the antisense strand (counting from the 5′ end) are 2′-fluoro modified nucleotides. In still other embodiments, nucleotides at positions 2, 4, 6, 7, 10, 12, and 14 in the antisense strand (counting from the 5′ end) are 2′-fluoro modified nucleotides. In alternative embodiments, nucleotides at positions 2, 7, 10, 12, and 14 in the antisense strand (counting from the 5′ end) are 2′-fluoro modified nucleotides. In certain other embodiments, nucleotides at positions 2, 4, 7, 10, 12, and 14 in the antisense strand (counting from the 5′ end) are 2′-fluoro modified nucleotides.

[0070] In any of the above-described embodiments, nucleotides in the sense strand at positions paired with positions 3, 8 to 11, and 13 in the antisense strand (counting from the 5′ end) are 2′-fluoro modified nucleotides. In some embodiments, nucleotides in the sense strand at positions paired with positions 5, 8 to 11, and 13 in the antisense strand (counting from the 5′ end) are 2′-fluoro modified nucleotides. In other embodiments, nucleotides in the sense strand at positions paired with positions 3, 5, 8 to 11, and 13 in the antisense strand (counting from the 5′ end) are 2′-fluoro modified nucleotides.

[0071] In some embodiments, the RNAi construct of the invention comprises a structure represented by Formula (A):

5′-(N_{A})ₓN_{L}N_{L}N_{L}N_{L}N_{L}N_{L}N_{F}N_{L}N_{F}N_{F}N_{F}N_{F}N_{L}N_{L}N_{M}N_{L}N_{M}N_{L}N_{T}(n)_{y}-3′

3′-(N_{B})_{z}N_{L}N_{L}N_{L}N_{L}N_{L}N_{F}N_{L}N_{M}N_{L}N_{M}N_{L}N_{L}N_{F}N_{M}N_{L}N_{M}N_{L}N_{F}N_{L}-5′ (A)

[0072] In Formula (A), the top strand listed in the 5′ to 3′ direction is the sense strand and the bottom strand listed in the 3′ to 5′ direction is the antisense strand; each N_{F} represents a 2′-fluoro modified nucleotide; each N_{M} independently represents a modified nucleotide selected from a 2′-fluoro modified nucleotide, a 2′-O-methyl modified nucleotide, a 2′-O-methoxyethyl modified nucleotide, a 2′-O-alkyl modified nucleotide, a 2′-O-allyl modified nucleotide, a BNA, and a deoxyribonucleotide; each N_{L} independently represents a modified nucleotide selected from a 2′-O-methyl modified nucleotide, a 2′-O-methoxyethyl modified nucleotide, a 2′-O-alkyl modified nucleotide, a 2′-O-allyl modified nucleotide, a BNA, and a deoxyribonucleotide; and N_{T} represents a modified nucleotide selected from an abasic nucleotide, an inverted abasic nucleotide, an inverted deoxyribonucleotide, a 2′-O-methyl modified nucleotide, a 2′-O-methoxyethyl modified nucleotide, a 2′-O-alkyl modified nucleotide, a 2′-O-allyl modified nucleotide, a BNA, and a deoxyribonucleotide. X can be an integer from 0 to 4, provided that when x is 1, 2, 3, or 4, one or more of the N_{A} nucleotides is a modified nucleotide independently selected from an abasic nucleotide, an inverted abasic nucleotide, an inverted deoxyribonucleotide, a 2′-O-methyl modified nucleotide, a 2′-O-methoxyethyl modified nucleotide, a 2′-O-alkyl modified nucleotide, a 2′-O-allyl modified nucleotide, a BNA, and a deoxyribonucleotide. One or more of the N_{A} nucleotides can be complementary to nucleotides in the antisense strand. Y can be an integer from 0 to 4, provided that when y is 1, 2, 3, or 4, one or more n nucleotides are modified or unmodified overhang nucleotides that do not base pair with nucleotides in the antisense strand. Z can be an integer from 0 to 4, provided that when z is 1, 2, 3, or 4, one or more of the N_{B} nucleotides is a modified nucleotide independently selected from a 2′-O-methyl modified nucleotide, a 2′-O-methoxyethyl modified nucleotide, a 2′-O-alkyl modified nucleotide, a 2′-O-allyl modified nucleotide, a BNA, and a deoxyribonucleotide. One or more of the N_{B} nucleotides can be complementary to N_{A} nucleotides when present in the sense strand or can be overhang nucleotides that do not base pair with nucleotides in the sense strand.

[0073] In some embodiments in which the RNAi construct comprises a structure represented by Formula (A), there is a nucleotide overhang at the 3′ end of the sense strand—i.e. y is 1, 2, 3, or 4. In one such embodiment, y is 2. In embodiments in which there is an overhang of 2 nucleotides at the 3′ end of the sense strand (i.e. y is 2), x is 0 and z is 2 or x is 1 and z is 2. In other embodiments in which the RNAi construct comprises a structure represented by Formula (A), the RNAi construct comprises a blunt end at the 3′ end of the sense strand and the 5′ end of the antisense strand (i.e. y is 0). In such embodiments where there is no nucleotide overhang at the 3′ end of the sense strand (i.e. y is 0): (i) x is 2 and z is 4, (ii) x is 3 and z is 4, (iii) x is 0 and z is 2, (iv) x is 1 and z is 2, or (v) x is 2 and z is 2. In any of the embodiments in which x is greater than 0, the N_{A} nucleotide that is the terminal nucleotide at the 5′ end of the sense strand can be an inverted nucleotide, such as an inverted abasic nucleotide or an inverted deoxyribonucleotide.

[0074] In certain embodiments in which the RNAi construct comprises a structure represented by Formula (A), the N_{M} at positions 4 and 12 in the antisense strand counting from the 5′ end are each a 2′-fluoro modified nucleotide. In other embodiments, the N_{M} at positions 4, 6, and 12 in the antisense strand counting from the 5′ end are each a 2′-fluoro modified nucleotide. In yet other embodiments, the N_{M} at positions 4, 6, 10, and 12 in the antisense strand counting from the 5′ end are each a 2′-fluoro modified nucleotide. In alternative embodiments in which the RNAi construct comprises a structure represented by Formula (A), the N_{M} at positions 10 and 12 in the antisense strand counting from the 5′ end are each a 2′-fluoro modified nucleotide. In related embodiments, the N_{M} at positions 4, 10, and 12 in the antisense strand counting from the 5′ end are each a 2′-fluoro modified nucleotide. In other alternative embodiments in which the RNAi construct comprises a structure represented by Formula (A), the N_{M} at positions 4, 6, and 10 in the antisense strand counting from the 5′ end are each a 2′-O-methyl modified nucleotide, and the N_{M} at position 12 in the antisense strand counting from the 5′ end is a 2′-fluoro modified nucleotide. In some embodiments in which the RNAi construct comprises a structure represented by Formula (A), each N_{M} in the sense strand is a 2′-O-methyl modified nucleotide. In other embodiments, each N_{M} in the sense strand is a 2′-fluoro modified nucleotide. In still other embodiments in which the RNAi construct comprises a structure represented by Formula (A), each N_{M} in both the sense and antisense strands is a 2′-O-methyl modified nucleotide.

[0075] In any of the above-described embodiments in which the RNAi construct comprises a structure represented by Formula (A), each N_{L} in both the sense and antisense strands can be a 2′-O-methyl modified nucleotide. In these embodiments and any of the embodiments described above, N_{T} in Formula (A) can be an inverted abasic nucleotide, an inverted deoxyribonucleotide, or a 2′-O-methyl modified nucleotide.

[0076] In other embodiments of the invention, the RNAi construct of the invention comprises a structure represented by Formula (B):

5′-(N_{A})ₓN_{L}N_{L}N_{L}N_{L}N_{M}N_{L}N_{F}N_{F}N_{F}N_{F}N_{L}N_{L}N_{L}N_{L}N_{L}N_{L}N_{L}N_{L}N_{T}(n)_{y}-3′

3′-(N_{B})_{z}N_{L}N_{L}N_{L}N_{M}N_{L}N_{F}N_{L}N_{M}N_{L}N_{L}N_{M}N_{M}N_{M}N_{M}N_{L}N_{M}N_{L}N_{F}N_{L}-5′ (B)

[0077] In Formula (B), the top strand listed in the 5′ to 3′ direction is the sense strand and the bottom strand listed in the 3′ to 5′ direction is the antisense strand; each N_{F} represents a 2′-fluoro modified nucleotide; each N_{M} independently represents a modified nucleotide selected from a 2′-fluoro modified nucleotide, a 2′-O-methyl modified nucleotide, a 2′-O-methoxyethyl modified nucleotide, a 2′-O-alkyl modified nucleotide, a 2′-O-allyl modified nucleotide, a BNA, and a deoxyribonucleotide; each N_{L} independently represents a modified nucleotide selected from a 2′-O-methyl modified nucleotide, a 2′-O-methoxyethyl modified nucleotide, a 2′-O-alkyl modified nucleotide, a 2′-O-allyl modified nucleotide, a BNA, and a deoxyribonucleotide; and N_{T} represents a modified nucleotide selected from an abasic nucleotide, an inverted abasic nucleotide, an inverted deoxyribonucleotide, a 2′-O-methyl modified nucleotide, a 2′-O-methoxyethyl modified nucleotide, a 2′-O-alkyl modified nucleotide, a 2′-O-allyl modified nucleotide, a BNA, and a deoxyribonucleotide. X can be an integer from 0 to 4, provided that when x is 1, 2, 3, or 4, one or more of the N_{A} nucleotides is a modified nucleotide independently selected from an abasic nucleotide, an inverted abasic nucleotide, an inverted deoxyribonucleotide, a 2′-O-methyl modified nucleotide, a 2′-O-methoxyethyl modified nucleotide, a 2′-O-alkyl modified nucleotide, a 2′-O-allyl modified nucleotide, a BNA, and a deoxyribonucleotide. One or more of the N_{A} nucleotides can be complementary to nucleotides in the antisense strand. Y can be an integer from 0 to 4, provided that when y is 1, 2, 3, or 4, one or more n nucleotides are modified or unmodified overhang nucleotides that do not base pair with nucleotides in the antisense strand. Z can be an integer from 0 to 4, provided that when z is 1, 2, 3, or 4, one or more of the N_{B} nucleotides is a modified nucleotide independently selected from a 2′-O-methyl modified nucleotide, a 2′-O-methoxyethyl modified nucleotide, a 2′-O-alkyl modified nucleotide, a 2′-O-allyl modified nucleotide, a BNA, and a deoxyribonucleotide. One or more of the N_{B} nucleotides can be complementary to N_{A} nucleotides when present in the sense strand or can be overhang nucleotides that do not base pair with nucleotides in the sense strand.

[0078] In some embodiments in which the RNAi construct comprises a structure represented by Formula (B), there is a nucleotide overhang at the 3′ end of the sense strand—i.e. y is 1, 2, 3, or 4. In one such embodiment, y is 2. In embodiments in which there is an overhang of 2 nucleotides at the 3′ end of the sense strand (i.e. y is 2), x is 0 and z is 2 or x is 1 and z is 2. In other embodiments in which the RNAi construct comprises a structure represented by Formula (B), the RNAi construct comprises a blunt end at the 3′ end of the sense strand and the 5′ end of the antisense strand (i.e. y is 0). In such embodiments where there is no nucleotide overhang at the 3′ end of the sense strand (i.e. y is 0): (i) x is 2 and z is 4, (ii) x is 3 and z is 4, (iii) x is 0 and z is 2, (iv) x is 1 and z is 2, or (v) x is 2 and z is 2. In any of the embodiments in which x is greater than 0, the N_{A} nucleotide that is the terminal nucleotide at the 5′ end of the sense strand can be an inverted nucleotide, such as an inverted abasic nucleotide or an inverted deoxyribonucleotide.

[0079] In certain embodiments in which the RNAi construct comprises a structure represented by Formula (B), the N_{M} at positions 4, 6, 8, 9, and 16 in the antisense strand counting from the 5′ end are each a 2′-fluoro modified nucleotide and the N_{M} at positions 7 and 12 in the antisense strand counting from the 5′ end are each a 2′-O-methyl modified nucleotide. In other embodiments, the N_{M} at positions 4 and 6 in the antisense strand counting from the 5′ end are each a 2′-fluoro modified nucleotide and the N_{M} at positions 7 to 9 in the antisense strand counting from the 5′ end are each a 2′-O-methyl modified nucleotide. In still other embodiments, the N_{M} at positions 4, 6, 8, 9, and 16 in the antisense strand counting from the 5′ end are each a 2′-O-methyl modified nucleotide and the N_{M} at positions 7 and 12 in the antisense strand counting from the 5′ end are each a 2′-fluoro modified nucleotide. In alternative embodiments in which the RNAi construct comprises a structure represented by Formula (B), the N_{M} at positions 4, 6, 8, 9, and 12 in the antisense strand counting from the 5′ end are each a 2′-O-methyl modified nucleotide and the N_{M} at positions 7 and 16 in the antisense strand counting from the 5′ end are each a 2′-fluoro modified nucleotide. In certain other embodiments in which the RNAi construct comprises a structure represented by Formula (B), the N_{M} at positions 7, 8, 9, and 12 in the antisense strand counting from the 5′ end are each a 2′-O-methyl modified nucleotide and the N_{M} at positions 4, 6, and 16 in the antisense strand counting from the 5′ end are each a 2′-fluoro modified nucleotide. In these and other embodiments in which the RNAi construct comprises a structure represented by Formula (B), the N_{M} in the sense strand is a 2′-fluoro modified nucleotide. In alternative embodiments, the N_{M} in the sense strand is a 2′-O-methyl modified nucleotide.

[0080] In any of the above-described embodiments in which the RNAi construct comprises a structure represented by Formula (B), each N_{L} in both the sense and antisense strands can be a 2′-O-methyl modified nucleotide. In these embodiments and any of the embodiments described above, N_{T} in Formula (B) can be an inverted abasic nucleotide, an inverted deoxyribonucleotide, or a 2′-O-methyl modified nucleotide.

[0081] The RNAi constructs of the invention may also comprise one or more modified internucleotide linkages. As used herein, the term “modified internucleotide linkage” refers to an internucleotide linkage other than the natural 3′ to 5′ phosphodiester linkage. In some embodiments, the modified internucleotide linkage is a phosphorous-containing internucleotide linkage, such as a phosphotriester, aminoalkylphosphotriester, an alkylphosphonate (e.g. methylphosphonate, 3′-alkylene phosphonate), a phosphinate, a phosphoramidate (e.g. 3′-amino phosphoramidate and aminoalkylphosphoramidate), a phosphorothioate, a chiral phosphorothioate, a phosphorodithioate, a thionophosphoramidate, a thionoalkylphosphonate, a thionoalkylphosphotriester, and a boranophosphate. In one embodiment, a modified internucleotide linkage is a 2′ to 5′ phosphodiester linkage. In other embodiments, the modified internucleotide linkage is a non-phosphorous-containing internucleotide linkage and thus can be referred to as a modified internucleoside linkage. Such non-phosphorous-containing linkages include, but are not limited to, morpholino linkages (formed in part from the sugar portion of a nucleoside); siloxane linkages (—O—Si(H)₂—O—); sulfide, sulfoxide and sulfone linkages; formacetyl and thioformacetyl linkages; alkene containing backbones; sulfamate backbones; methylenemethylimino (—CH₂—N(CH₃)—O—CH₂—) and methylenehydrazino linkages; sulfonate and sulfonamide linkages; amide linkages; and others having mixed N, O, S and CH₂ component parts. In one embodiment, the modified internucleoside linkage is a peptide-based linkage (e.g. aminoethylglycine) to create a peptide nucleic acid or PNA, such as those described in U.S. Pat. Nos. 5,539,082; 5,714,331; and 5,719,262. Other suitable modified internucleotide and internucleoside linkages that may be employed in the RNAi constructs of the invention are described in U.S. Pat. Nos. 6,693,187, 9,181,551, U.S. Patent Publication No. 2016/0122761, and Deleavey and Damha, Chemistry and Biology, Vol. 19: 937-954, 2012, all of which are hereby incorporated by reference in their entireties.

[0082] In certain embodiments, the RNAi constructs of the invention comprise one or more phosphorothioate internucleotide linkages. The phosphorothioate internucleotide linkages may be present in the sense strand, antisense strand, or both strands of the RNAi constructs. For instance, in some embodiments, the sense strand comprises 1, 2, 3, 4, 5, 6, 7, 8, or more phosphorothioate internucleotide linkages. In other embodiments, the antisense strand comprises 1, 2, 3, 4, 5, 6, 7, 8, or more phosphorothioate internucleotide linkages. In still other embodiments, both strands comprise 1, 2, 3, 4, 5, 6, 7, 8, or more phosphorothioate internucleotide linkages. The RNAi constructs can comprise one or more phosphorothioate internucleotide linkages at the 3′-end, the 5′-end, or both the 3′- and 5′-ends of the sense strand, the antisense strand, or both strands. For instance, in certain embodiments, the RNAi construct comprises about 1 to about 6 or more (e.g., about 1, 2, 3, 4, 5, 6 or more) consecutive phosphorothioate internucleotide linkages at the 3′-end of the sense strand, the antisense strand, or both strands. In other embodiments, the RNAi construct comprises about 1 to about 6 or more (e.g., about 1, 2, 3, 4, 5, 6 or more) consecutive phosphorothioate internucleotide linkages at the 5′-end of the sense strand, the antisense strand, or both strands. In one particular embodiment, the antisense strand comprises at least 1 but no more than 6 phosphorothioate internucleotide linkages and the sense strand comprises at least 1 but no more than 4 phosphorothioate internucleotide linkages. In another particular embodiment, the antisense strand comprises at least 1 but no more than 4 phosphorothioate internucleotide linkages and the sense strand comprises at least 1 but no more than 2 phosphorothioate internucleotide linkages.

[0083] In some embodiments, the RNAi construct comprises a single phosphorothioate internucleotide linkage between the terminal nucleotides at the 3′ end of the sense strand. In other embodiments, the RNAi construct comprises two consecutive phosphorothioate internucleotide linkages between the terminal nucleotides at the 3′ end of the sense strand. In one embodiment, the RNAi construct comprises a single phosphorothioate internucleotide linkage between the terminal nucleotides at the 3′ end of the sense strand and a single phosphorothioate internucleotide linkage between the terminal nucleotides at the 3′ end of the antisense strand. In another embodiment, the RNAi construct comprises two consecutive phosphorothioate internucleotide linkages between the terminal nucleotides at the 3′ end of the antisense strand (i.e. a phosphorothioate internucleotide linkage at the first and second internucleotide linkages at the 3′ end of the antisense strand). In another embodiment, the RNAi construct comprises two consecutive phosphorothioate internucleotide linkages between the terminal nucleotides at both the 3′ and 5′ ends of the antisense strand. In yet another embodiment, the RNAi construct comprises two consecutive phosphorothioate internucleotide linkages between the terminal nucleotides at both the 3′ and 5′ ends of the antisense strand and two consecutive phosphorothioate internucleotide linkages at the 5′ end of the sense strand. In still another embodiment, the RNAi construct comprises two consecutive phosphorothioate internucleotide linkages between the terminal nucleotides at both the 3′ and 5′ ends of the antisense strand and two consecutive phosphorothioate internucleotide linkages between the terminal nucleotides at the 3′ end of the sense strand. In another embodiment, the RNAi construct comprises two consecutive phosphorothioate internucleotide linkages between the terminal nucleotides at both the 3′ and 5′ ends of the antisense strand and two consecutive phosphorothioate internucleotide linkages between the terminal nucleotides at both the 3′ and 5′ ends of the sense strand (i.e. a phosphorothioate internucleotide linkage at the first and second internucleotide linkages at both the 5′ and 3′ ends of the antisense strand and a phosphorothioate internucleotide linkage at the first and second internucleotide linkages at both the 5′ and 3′ ends of the sense strand). In yet another embodiment, the RNAi construct comprises two consecutive phosphorothioate internucleotide linkages between the terminal nucleotides at both the 3′ and 5′ ends of the antisense strand and a single phosphorothioate internucleotide linkage between the terminal nucleotides at the 3′ end of the sense strand. In any of the embodiments in which one or both strands comprise one or more phosphorothioate internucleotide linkages, the remaining internucleotide linkages within the strands can be the natural 3′ to 5′ phosphodiester linkages. For instance, in some embodiments, each internucleotide linkage of the sense and antisense strands is selected from phosphodiester and phosphorothioate, wherein at least one internucleotide linkage is a phosphorothioate.

[0084] In embodiments in which the RNAi construct comprises a nucleotide overhang, two or more of the unpaired nucleotides in the overhang can be connected by a phosphorothioate internucleotide linkage. In certain embodiments, all the unpaired nucleotides in a nucleotide overhang at the 3′ end of the antisense strand and/or the sense strand are connected by phosphorothioate internucleotide linkages. In other embodiments, all the unpaired nucleotides in a nucleotide overhang at the 5′ end of the antisense strand and/or the sense strand are connected by phosphorothioate internucleotide linkages. In still other embodiments, all the unpaired nucleotides in any nucleotide overhang are connected by phosphorothioate internucleotide linkages.

[0085] Incorporation of a phosphorothioate internucleotide linkage introduces an additional chiral center at the phosphorous atom in the oligonucleotide and therefore creates a diastereomer pair (Rp and Sp) at each phosphorothioate internucleotide linkage. Diastereomers or diastereoisomers are different configurations of a compound that have the same molecular formula and sequence of bonded atoms but differ in the three-dimensional orientations of their atoms in space. Unlike enantiomers, diastereomers are not mirror-images of each other. Each chiral phosphate atom can be in the “R” configuration (Rp) or the “S” configuration (Sp). In certain embodiments, the RNAi constructs of the invention may comprise one or more phosphorothioate internucleotide linkages where the chiral phosphates are selected to be primarily in either the Rp or Sp configuration. For instance, in some embodiments in which the RNAi constructs have one or more phosphorothioate internucleotide linkages, at least about 70%, at least about 75%, at least about 80%, at least about 85%, at least about 90%, or at least about 95% of the chiral phosphates are in the Sp configuration. In other embodiments in which the RNAi constructs have one or more phosphorothioate internucleotide linkages, at least about 70%, at least about 75%, at least about 80%, at least about 85%, at least about 90%, or at least about 95% of the chiral phosphates are in the Rp configuration. All the chiral phosphates in the RNAi construct can be either in the Sp configuration or the Rp configuration (i.e. the RNAi construct is stereopure). In one particular embodiment, all the chiral phosphates in the RNAi construct are in the Sp configuration. In another particular embodiment, all the chiral phosphates in the RNAi construct are in the Rp configuration.

[0086] In certain embodiments, the chiral phosphates in the RNAi construct may have different configurations at different positions in the sense strand or antisense strand. In one such embodiment in which the RNAi construct comprises one or two phosphorothioate internucleotide linkages at the 5′ end of the antisense strand, the chiral phosphates at the 5′ end of the antisense strand may be in the Rp configuration. In another such embodiment in which the RNAi construct comprises one or two phosphorothioate internucleotide linkages at the 3′ end of the antisense strand, the chiral phosphates at the 3′ end of the antisense strand may be in the Sp configuration. In certain embodiments, the RNAi construct comprises two consecutive phosphorothioate internucleotide linkages between the terminal nucleotides at both the 3′ and 5′ ends of the antisense strand and two consecutive phosphorothioate internucleotide linkages between the terminal nucleotides at the 3′ end of the sense strand, wherein the chiral phosphates at the 5′ end of the antisense strand are in the Rp configuration, the chiral phosphates at the 3′ end of the antisense strand are in the Sp configuration, and the chiral phosphates at the 3′ end of the sense strand can be either in the Rp or Sp configuration. In certain other embodiments, the RNAi construct comprises two consecutive phosphorothioate internucleotide linkages between the terminal nucleotides at both the 3′ and 5′ ends of the antisense strand and a single phosphorothioate internucleotide linkage between the terminal nucleotides at the 3′ end of the sense strand, wherein the chiral phosphates at the 5′ end of the antisense strand are in the Rp configuration, the chiral phosphates at the 3′ end of the antisense strand are in the Sp configuration, and the chiral phosphate at the 3′ end of the sense strand can be either in the Rp or Sp configuration. Methods of controlling the stereochemistry of phosphorothioate linkages during oligonucleotide synthesis are known to those skilled in the art and can include methods described in Nawrot and Rebowska, Curr Protoc Nucleic Acid Chem. 2009, Chapter 4: doi:10.1002/0471142700.nc0434s362009; Jahns et al., Nat. Commun, Vol. 6: 6317, 2015; Knouse et al., Science, Vol. 361: 1234-1238, 2018; and Sakamuri et al., Chembiochem, Vol. 21(9): 1304-1308, 2020.

[0087] In some embodiments of the RNAi constructs of the invention, the 5′ end of the sense strand, antisense strand, or both the antisense and sense strands comprises a phosphate moiety. As used herein, the term “phosphate moiety” refers to a terminal phosphate group that includes unmodified phosphates (—O—P═O)(OH)OH) as well as modified phosphates. Modified phosphates include phosphates in which one or more of the O and OH groups are replaced with H, O, S, N(R) or alkyl (e.g. C₁ to C₁₂) where R is H, an amino protecting group or unsubstituted or substituted alkyl (e.g. C₁ to C₁₂). Exemplary phosphate moieties include, but are not limited to, 5′-monophosphate; 5′-diphosphate; 5′-triphosphate; 5′-guanosine cap (7-methylated or non-methylated); 5′-adenosine cap or any other modified or unmodified nucleotide cap structure; 5′-monothiophosphate (phosphorothioate); 5′-monodithiophosphate (phosphorodithioate); 5′-alpha-thiotriphosphate; 5′-gamma-thiotriphosphate, 5′-phosphoramidates; 5′-vinylphosphates; 5′-alkylphosphonates (e.g., alkyl=methyl, ethyl, isopropyl, propyl, etc.); and 5′-alkyletherphosphonates (e.g., alkylether=methoxymethyl, ethoxymethyl, etc.).

[0088] The modified nucleotides that can be incorporated into the RNAi constructs of the invention may have more than one chemical modification described herein. For instance, the modified nucleotide may have a modification to the ribose sugar as well as a modification to the nucleobase. By way of example, a modified nucleotide may comprise a 2′ sugar modification (e.g. 2′-fluoro or 2′-O-methyl) and comprise a modified base (e.g. 5-methyl cytosine or pseudouracil). In other embodiments, the modified nucleotide may comprise a sugar modification in combination with a modification to the 5′ phosphate that would create a modified internucleotide or internucleoside linkage when the modified nucleotide was incorporated into a polynucleotide. For instance, in some embodiments, the modified nucleotide may comprise a sugar modification, such as a 2′-fluoro modification, a 2′-O-methyl modification, or a bicyclic sugar modification, as well as a 5′ phosphorothioate group. Accordingly, in some embodiments, one or both strands of the RNAi constructs of the invention comprise a combination of 2′ modified nucleotides or BNAs and phosphorothioate internucleotide linkages. In certain embodiments, both the sense and antisense strands of the RNAi constructs of the invention comprise a combination of 2′-fluoro modified nucleotides, 2′-O-methyl modified nucleotides, and phosphorothioate internucleotide linkages. Exemplary RNAi constructs comprising modified nucleotides and internucleotide linkages are shown in Table 2.

[0089] The RNAi constructs of the invention can readily be made using techniques known in the art, for example, using conventional nucleic acid solid phase synthesis. The polynucleotides of the RNAi constructs can be assembled on a suitable nucleic acid synthesizer utilizing standard nucleotide or nucleoside precursors (e.g. phosphoramidites). Automated nucleic acid synthesizers are sold commercially by several vendors, including DNA/RNA synthesizers from Applied Biosystems (Foster City, Calif.), MerMade synthesizers from BioAutomation (Irving, Tex.), and OligoPilot synthesizers from GE Healthcare Life Sciences (Pittsburgh, Pa.). An exemplary method for synthesizing the RNAi constructs of the invention is described in Example 2.

[0090] A 2′ silyl protecting group can be used in conjunction with acid labile dimethoxytrityl (DMT) at the 5′ position of ribonucleosides to synthesize oligonucleotides via phosphoramidite chemistry. Final deprotection conditions are known not to significantly degrade RNA products. All syntheses can be conducted in any automated or manual synthesizer on large, medium, or small scale. The syntheses may also be carried out in multiple well plates, columns, or glass slides.

[0091] The 2′-O-silyl group can be removed via exposure to fluoride ions, which can include any source of fluoride ion, e.g., those salts containing fluoride ion paired with inorganic counterions e.g., cesium fluoride and potassium fluoride or those salts containing fluoride ion paired with an organic counterion, e.g., a tetraalkylammonium fluoride. A crown ether catalyst can be utilized in combination with the inorganic fluoride in the deprotection reaction. Exemplary fluoride ion sources are tetrabutylammonium fluoride or aminohydrofluorides (e.g., combining aqueous HF with triethylamine in a dipolar aprotic solvent, e.g., dimethylformamide).

[0092] The choice of protecting groups for use on the phosphite triesters and phosphotriesters can alter the stability of the triesters towards fluoride. Methyl protection of the phosphotriester or phosphite triester can stabilize the linkage against fluoride ions and improve process yields.

[0093] Since ribonucleosides have a reactive 2′ hydroxyl substituent, it can be desirable to protect the reactive 2′ position in RNA with a protecting group that is orthogonal to a 5′-O-dimethoxytrityl protecting group, e.g., one stable to treatment with acid. Silyl protecting groups meet this criterion and can be readily removed in a final fluoride deprotection step that can result in minimal RNA degradation.

[0094] Tetrazole catalysts can be used in the standard phosphoramidite coupling reaction. Exemplary catalysts include, e.g., tetrazole, S-ethyl-tetrazole, benzylthiotetrazole, p-nitrophenyltetrazole.

[0095] As can be appreciated by the skilled artisan, further methods of synthesizing the RNAi constructs described herein will be evident to those of ordinary skill in the art. Additionally, the various synthetic steps may be performed in an alternate sequence or order to give the desired compounds. Other synthetic chemistry transformations, protecting groups (e.g., for hydroxyl, amino, etc. present on the bases) and protecting group methodologies (protection and deprotection) useful in synthesizing the RNAi constructs described herein are known in the art and include, for example, those such as described in R. Larock, Comprehensive Organic Transformations, VCH Publishers (1989); T. W. Greene and P. G. M. Wuts, Protective Groups in Organic Synthesis, 2d. Ed., John Wiley and Sons (1991); L. Fieser and M. Fieser, Fieser and Fieser's Reagents for Organic Synthesis, John Wiley and Sons (1994); and L. Paquette, ed., Encyclopedia of Reagents for Organic Synthesis, John Wiley and Sons (1995), and subsequent editions thereof. Custom synthesis of RNAi constructs is also available from several commercial vendors, including Dharmacon, Inc. (Lafayette, Colo.), AxoLabs GmbH (Kulmbach, Germany), and Ambion, Inc. (Foster City, Calif.).

[0096] The RNAi constructs of the invention may comprise a ligand. As used herein, a “ligand” refers to any compound or molecule that is capable of interacting with another compound or molecule, directly or indirectly. The interaction of a ligand with another compound or molecule may elicit a biological response (e.g. initiate a signal transduction cascade, induce receptor-mediated endocytosis) or may just be a physical association. The ligand can modify one or more properties of the double-stranded RNA molecule to which is attached, such as the pharmacodynamic, pharmacokinetic, binding, absorption, cellular distribution, cellular uptake, charge and/or clearance properties of the RNA molecule.

[0097] The ligand may comprise a serum protein (e.g., human serum albumin, low-density lipoprotein, globulin), a cholesterol moiety, a vitamin (biotin, vitamin E, vitamin B 12), a folate moiety, a steroid, a bile acid (e.g. cholic acid), a fatty acid (e.g., palmitic acid, myristic acid), a carbohydrate (e.g., a dextran, pullulan, chitin, chitosan, inulin, cyclodextrin or hyaluronic acid), a glycoside, a phospholipid, or antibody or binding fragment thereof (e.g. antibody or binding fragment that targets the RNAi construct to a specific cell type, such as liver). Other examples of ligands include dyes, intercalating agents (e.g. acridines), cross-linkers (e.g. psoralene, mitomycin C), porphyrins (TPPC4, texaphyrin, Sapphyrin), polycyclic aromatic hydrocarbons (e.g., phenazine, dihydrophenazine), artificial endonucleases (e.g. EDTA), lipophilic molecules, e.g, adamantane acetic acid, 1-pyrene butyric acid, dihydrotestosterone, 1,3-Bis-O(hexadecyl)glycerol, geranyloxyhexyl group, hexadecylglycerol, borneol, menthol, 1,3-propanediol, heptadecyl group, O3-(oleoyl)lithocholic acid, O3-(oleoyl)cholenic acid, dimethoxytrityl, or phenoxazine), peptides (e.g., antennapedia peptide, Tat peptide, RGD peptides), alkylating agents, polymers, such as polyethylene glycol (PEG)(e.g., PEG-40K), polyamino acids, and polyamines (e.g. spermine, spermidine).

[0098] In certain embodiments, the ligands have endosomolytic properties. The endosomolytic ligands promote the lysis of the endosome and/or transport of the RNAi construct of the invention, or its components, from the endosome to the cytoplasm of the cell. The endosomolytic ligand may be a polycationic peptide or peptidomimetic, which shows pH-dependent membrane activity and fusogenicity. In one embodiment, the endosomolytic ligand assumes its active conformation at endosomal pH. The “active” conformation is that conformation in which the endosomolytic ligand promotes lysis of the endosome and/or transport of the RNAi construct of the invention, or its components, from the endosome to the cytoplasm of the cell. Exemplary endosomolytic ligands include the GALA peptide (Subbarao et al., Biochemistry, Vol. 26: 2964-2972, 1987), the EALA peptide (Vogel et al., J. Am. Chem. Soc., Vol. 118: 1581-1586, 1996), and their derivatives (Turk et al., Biochem. Biophys. Acta, Vol. 1559: 56-68, 2002). In one embodiment, the endosomolytic component may contain a chemical group (e.g., an amino acid) which will undergo a change in charge or protonation in response to a change in pH. The endosomolytic component may be linear or branched.

[0099] In some embodiments, the ligand comprises a lipid or other hydrophobic molecule. In one embodiment, the ligand comprises a cholesterol moiety or other steroid. Cholesterol-conjugated oligonucleotides have been reported to be more active than their unconjugated counterparts (Manoharan, Antisense Nucleic Acid Drug Development, Vol. 12: 103-228, 2002). Ligands comprising cholesterol moieties and other lipids for conjugation to nucleic acid molecules have also been described in U.S. Pat. Nos. 7,851,615; 7,745,608; and 7,833,992, all of which are hereby incorporated by reference in their entireties. In another embodiment, the ligand comprises a folate moiety. Polynucleotides conjugated to folate moieties can be taken up by cells via a receptor-mediated endocytosis pathway. Such folate-polynucleotide conjugates are described in U.S. Pat. No. 8,188,247, which is hereby incorporated by reference in its entirety.

[0100] In certain embodiments, it is desirable to specifically deliver the RNAi constructs of the invention to liver cells to reduce expression of mARC1 protein specifically in the liver. Accordingly, in certain embodiments, the ligand targets delivery of the RNAi construct specifically to liver cells (e.g. hepatocytes) using various approaches as described in more detail below. In certain embodiments, the RNAi constructs are targeted to liver cells with a ligand that binds to the surface-expressed asialoglycoprotein receptor (ASGR) or component thereof (e.g. ASGR1, ASGR2).

[0101] In some embodiments, RNAi constructs can be specifically targeted to the liver by employing ligands that bind to or interact with proteins expressed on the surface of liver cells. For example, in certain embodiments, the ligands may comprise antigen binding proteins (e.g. antibodies or binding fragments thereof (e.g. Fab, scFv)) that specifically bind to a receptor expressed on hepatocytes, such as the asialoglycoprotein receptor and the LDL receptor. In one particular embodiment, the ligand comprises an antibody or binding fragment thereof that specifically binds to ASGR1 and/or ASGR2. In another embodiment, the ligand comprises a Fab fragment of an antibody that specifically binds to ASGR1 and/or ASGR2. A “Fab fragment” is comprised of one immunoglobulin light chain (i.e. light chain variable region (VL) and constant region (CL)) and the CH1 region and variable region (VH) of one immunoglobulin heavy chain. In another embodiment, the ligand comprises a single-chain variable antibody fragment (scFv fragment) of an antibody that specifically binds to ASGR1 and/or ASGR2. An “scFv fragment” comprises the VH and VL regions of an antibody, wherein these regions are present in a single polypeptide chain, and optionally comprising a peptide linker between the VH and VL regions that enables the Fv to form the desired structure for antigen binding. Exemplary antibodies and binding fragments thereof that specifically bind to ASGR1 that can be used as ligands for targeting the RNAi constructs of the invention to the liver are described in WIPO Publication No. WO 2017/058944, which is hereby incorporated by reference in its entirety. Other antibodies or binding fragments thereof that specifically bind to ASGR1, LDL receptor, or other liver surface-expressed proteins suitable for use as ligands in the RNAi constructs of the invention are commercially available.

[0102] In certain embodiments, the ligand comprises a carbohydrate. A “carbohydrate” refers to a compound made up of one or more monosaccharide units having at least 6 carbon atoms (which can be linear, branched or cyclic) with an oxygen, nitrogen or sulfur atom bonded to each carbon atom. Carbohydrates include, but are not limited to, the sugars (e.g., monosaccharides, disaccharides, trisaccharides, tetrasaccharides, and oligosaccharides containing from about 4, 5, 6, 7, 8, or 9 monosaccharide units), and polysaccharides, such as starches, glycogen, cellulose and polysaccharide gums. In some embodiments, the carbohydrate incorporated into the ligand is a monosaccharide selected from a pentose, hexose, or heptose and di- and tri-saccharides including such monosaccharide units. In other embodiments, the carbohydrate incorporated into the ligand is an amino sugar, such as galactosamine, glucosamine, N-acetylgalactosamine, and N-acetylglucosamine.

[0103] In some embodiments, the ligand comprises a hexose or hexosamine. The hexose may be selected from glucose, galactose, mannose, fucose, or fructose. The hexosamine may be selected from fructosamine, galactosamine, glucosamine, or mannosamine. In certain embodiments, the ligand comprises glucose, galactose, galactosamine, or glucosamine. In one embodiment, the ligand comprises glucose, glucosamine, or N-acetylglucosamine. In another embodiment, the ligand comprises galactose, galactosamine, or N-acetyl-galactosamine. In particular embodiments, the ligand comprises N-acetyl-galactosamine. Ligands comprising glucose, galactose, and N-acetyl-galactosamine (GalNAc) are particularly effective in targeting compounds to liver cells because such ligands bind to the ASGR expressed on the surface of hepatocytes. See, e.g., D'Souza and Devarajan, J. Control Release, Vol. 203: 126-139, 2015. Examples of GalNAc- or galactose-containing ligands that can be incorporated into the RNAi constructs of the invention are described in U.S. Pat. Nos. 7,491,805; 8,106,022; and 8,877,917; U.S. Patent Publication No. 20030130186; and WIPO Publication No. WO 2013166155, all of which are hereby incorporated by reference in their entireties.

[0104] In certain embodiments, the ligand comprises a multivalent carbohydrate moiety. As used herein, a “multivalent carbohydrate moiety” refers to a moiety comprising two or more carbohydrate units capable of independently binding or interacting with other molecules. For example, a multivalent carbohydrate moiety comprises two or more binding domains comprised of carbohydrates that can bind to two or more different molecules or two or more different sites on the same molecule. The valency of the carbohydrate moiety denotes the number of individual binding domains within the carbohydrate moiety. For instance, the terms “monovalent,” “bivalent,” “trivalent,” and “tetravalent” with reference to the carbohydrate moiety refer to carbohydrate moieties with one, two, three, and four binding domains, respectively. The multivalent carbohydrate moiety may comprise a multivalent lactose moiety, a multivalent galactose moiety, a multivalent glucose moiety, a multivalent N-acetyl-galactosamine moiety, a multivalent N-acetyl-glucosamine moiety, a multivalent mannose moiety, or a multivalent fucose moiety. In some embodiments, the ligand comprises a multivalent galactose moiety. In other embodiments, the ligand comprises a multivalent N-acetyl-galactosamine moiety. In these and other embodiments, the multivalent carbohydrate moiety can be bivalent, trivalent, or tetravalent. In such embodiments, the multivalent carbohydrate moiety can be bi-antennary or tri-antennary. In one particular embodiment, the multivalent N-acetyl-galactosamine moiety is trivalent or tetravalent. In another particular embodiment, the multivalent galactose moiety is trivalent or tetravalent. Exemplary trivalent and tetravalent GalNAc-containing ligands for incorporation into the RNAi constructs of the invention are described in detail below.

[0105] The ligand can be attached or conjugated to the RNA molecule of the RNAi construct directly or indirectly. For instance, in some embodiments, the ligand is covalently attached directly to the sense or antisense strand of the RNAi construct. In other embodiments, the ligand is covalently attached via a linker to the sense or antisense strand of the RNAi construct. The ligand can be attached to nucleobases, sugar moieties, or internucleotide linkages of polynucleotides (e.g. sense strand or antisense strand) of the RNAi constructs of the invention. Conjugation or attachment to purine nucleobases or derivatives thereof can occur at any position including, endocyclic and exocyclic atoms. In certain embodiments, the 2-, 6-, 7-, or 8-positions of a purine nucleobase are attached to a ligand. Conjugation or attachment to pyrimidine nucleobases or derivatives thereof can also occur at any position. In some embodiments, the 2-, 5-, and 6-positions of a pyrimidine nucleobase can be attached to a ligand. Conjugation or attachment to sugar moieties of nucleotides can occur at any carbon atom. Exemplary carbon atoms of a sugar moiety that can be attached to a ligand include the 2′, 3′, and 5′ carbon atoms. The 1′ position can also be attached to a ligand, such as in an abasic nucleotide. Internucleotide linkages can also support ligand attachments. For phosphorus-containing linkages (e.g., phosphodiester, phosphorothioate, phosphorodithiotate, phosphoroamidate, and the like), the ligand can be attached directly to the phosphorus atom or to an O, N, or S atom bound to the phosphorus atom. For amine- or amide-containing internucleoside linkages (e.g., PNA), the ligand can be attached to the nitrogen atom of the amine or amide or to an adjacent carbon atom.

[0106] In some embodiments, the ligand may be attached to the 3′ or 5′ end of either the sense or antisense strand. In certain embodiments, the ligand is covalently attached to the 5′ end of the sense strand. In such embodiments, the ligand is attached to the 5′-terminal nucleotide of the sense strand. In these and other embodiments, the ligand is attached at the 5′-position of the 5′-terminal nucleotide of the sense strand. In embodiments in which an inverted abasic nucleotide is the 5′-terminal nucleotide of the sense strand and linked to the adjacent nucleotide via a 5′-5′ internucleotide linkage, the ligand can be attached at the 3′-position of the inverted abasic nucleotide. In other embodiments, the ligand is covalently attached to the 3′ end of the sense strand. For example, in some embodiments, the ligand is attached to the 3′-terminal nucleotide of the sense strand. In certain such embodiments, the ligand is attached at the 3′-position of the 3′-terminal nucleotide of the sense strand. In embodiments in which an inverted abasic nucleotide is the 3′-terminal nucleotide of the sense strand and linked to the adjacent nucleotide via a 3′-3′ internucleotide linkage, the ligand can be attached at the 5′-position of the inverted abasic nucleotide. In alternative embodiments, the ligand is attached near the 3′ end of the sense strand, but before one or more terminal nucleotides (i.e. before 1, 2, 3, or 4 terminal nucleotides). In some embodiments, the ligand is attached at the 2′-position of the sugar of the 3′-terminal nucleotide of the sense strand. In other embodiments, the ligand is attached at the 2′-position of the sugar of the 5′-terminal nucleotide of the sense strand.

[0107] In certain embodiments, the ligand is attached to the sense or antisense strand via a linker. A “linker” is an atom or group of atoms that covalently joins a ligand to a polynucleotide component of the RNAi construct. The linker may be from about 1 to about 30 atoms in length, from about 2 to about 28 atoms in length, from about 3 to about 26 atoms in length, from about 4 to about 24 atoms in length, from about 6 to about 20 atoms in length, from about 7 to about 20 atoms in length, from about 8 to about 20 atoms in length, from about 8 to about 18 atoms in length, from about 10 to about 18 atoms in length, and from about 12 to about 18 atoms in length. In some embodiments, the linker may comprise a bifunctional linking moiety, which generally comprises an alkyl moiety with two functional groups. One of the functional groups is selected to bind to the compound of interest (e.g. sense or antisense strand of the RNAi construct) and the other is selected to bind essentially any selected group, such as a ligand as described herein. In certain embodiments, the linker comprises a chain structure or an oligomer of repeating units, such as ethylene glycol or amino acid units. Examples of functional groups that are typically employed in a bifunctional linking moiety include, but are not limited to, electrophiles for reacting with nucleophilic groups and nucleophiles for reacting with electrophilic groups. In some embodiments, bifunctional linking moieties include amino, hydroxyl, carboxylic acid, thiol, unsaturations (e.g., double or triple bonds), and the like.

[0108] Linkers that may be used to attach a ligand to the sense or antisense strand in the RNAi constructs of the invention include, but are not limited to, pyrrolidine, 8-amino-3,6-dioxaoctanoic acid, succinimidyl 4-(N-maleimidomethyl)cyclohexane-1-carboxylate, 6-aminohexanoic acid, substituted C₁-C₁₀ alkyl, substituted or unsubstituted C₂-C₁₀ alkenyl or substituted or unsubstituted C₂-C₁₀ alkynyl. Suitable substituent groups for such linkers include, but are not limited to, hydroxyl, amino, alkoxy, carboxy, benzyl, phenyl, nitro, thiol, thioalkoxy, halogen, alkyl, aryl, alkenyl and alkynyl.

[0109] In certain embodiments, the linkers are cleavable. A cleavable linker is one which is sufficiently stable outside the cell, but which upon entry into a target cell is cleaved to release the two parts the linker is holding together. In some embodiments, the cleavable linker is cleaved at least 10 times, 20 times, 30 times, 40 times, 50 times, 60 times, 70 times, 80 times, 90 times, or more, or at least 100 times faster in the target cell or under a first reference condition (which can, e.g., be selected to mimic or represent intracellular conditions) than in the blood of a subject, or under a second reference condition (which can, e.g., be selected to mimic or represent conditions found in the blood or serum).

[0110] Cleavable linkers are susceptible to cleavage agents, e.g., pH, redox potential or the presence of degradative molecules. Generally, cleavage agents are more prevalent or found at higher levels or activities inside cells than in serum or blood. Examples of such degradative agents include: redox agents which are selected for particular substrates or which have no substrate specificity, including, e.g., oxidative or reductive enzymes or reductive agents such as mercaptans, present in cells, that can degrade a redox cleavable linker by reduction; esterases; endosomes or agents that can create an acidic environment, e.g., those that result in a pH of five or lower; enzymes that can hydrolyze or degrade an acid cleavable linker by acting as a general acid, peptidases (which can be substrate specific), and phosphatases.

[0111] A cleavable linker may comprise a moiety that is susceptible to pH. The pH of human serum is 7.4, while the average intracellular pH is slightly lower, ranging from about 7.1-7.3. Endosomes have a more acidic pH, in the range of 5.5-6.0, and lysosomes have an even more acidic pH at around 5.0. Some linkers will have a cleavable group that is cleaved at a preferred pH, thereby releasing the RNA molecule from the ligand inside the cell, or into the desired compartment of the cell.

[0112] A linker can include a cleavable group that is cleavable by a particular enzyme. The type of cleavable group incorporated into a linker can depend on the cell to be targeted. For example, liver-targeting ligands can be linked to RNA molecules through a linker that includes an ester group. Liver cells are rich in esterases, and therefore the linker will be cleaved more efficiently in liver cells than in cell types that are not esterase-rich. Other types of cells rich in esterases include cells of the lung, renal cortex, and testis. Linkers that contain peptide bonds can be used when targeting cells rich in peptidases, such as liver cells and synoviocytes.

[0113] In general, the suitability of a candidate cleavable linker can be evaluated by testing the ability of a degradative agent (or condition) to cleave the candidate linker. It will also be desirable to also test the candidate cleavable linker for the ability to resist cleavage in the blood or when in contact with other non-target tissue. Thus, one can determine the relative susceptibility to cleavage between a first and a second condition, where the first is selected to be indicative of cleavage in a target cell and the second is selected to be indicative of cleavage in other tissues or biological fluids, e.g., blood or serum. The evaluations can be carried out in cell free systems, in cells, in cell culture, in organ or tissue culture, or in whole animals. It may be useful to make initial evaluations in cell-free or culture conditions and to confirm by further evaluations in whole animals. In some embodiments, useful candidate linkers are cleaved at least 2, 4, 10, 20, 50, 70, or 100 times faster in the cell (or under in vitro conditions selected to mimic intracellular conditions) as compared to blood or serum (or under in vitro conditions selected to mimic extracellular conditions).

[0114] In other embodiments, redox cleavable linkers are utilized. Redox cleavable linkers are cleaved upon reduction or oxidation. An example of a reductively cleavable group is a disulfide linking group (—S—S—). To determine if a candidate cleavable linker is a suitable “reductively cleavable linker,” or for example is suitable for use with a particular RNAi construct and particular ligand, one can use one or more methods described herein. For example, a candidate linker can be evaluated by incubation with dithiothreitol (DTT), or other reducing agent known in the art, which mimics the rate of cleavage that would be observed in a cell, e.g., a target cell. The candidate linkers can also be evaluated under conditions which are selected to mimic blood or serum conditions. In a specific embodiment, candidate linkers are cleaved by at most 10% in the blood. In other embodiments, useful candidate linkers are degraded at least 2, 4, 10, 20, 50, 70, or 100 times faster in the cell (or under in vitro conditions selected to mimic intracellular conditions) as compared to blood (or under in vitro conditions selected to mimic extracellular conditions).

[0115] In yet other embodiments, phosphate-based cleavable linkers, which are cleaved by agents that degrade or hydrolyze the phosphate group, are employed to covalently attach a ligand to the sense or antisense strand of the RNAi construct. An example of an agent that hydrolyzes phosphate groups in cells are enzymes, such as phosphatases in cells. Examples of phosphate-based cleavable groups are —O—P(O)(ORk)-O—, —O—P(S)(ORk)-O—, —O—P(S)(SRk)-O—, —S—P(O) (ORk)-O—, —O—P(O)(ORk)-S—, —S—P(O)(ORk)-S—, —O—P(S)(ORk)-S—, —S—P(S)(ORk)-O—, —O—P(O)(Rk)-O—, —O—P(S)(Rk)-O—, —S—P(O)(Rk)-O—, —S—P(S)(Rk)-O—, —S—P(O)(Rk)-S—, and —O—P(S)(Rk)-S—, where Rk can be hydrogen or C₁-C₁₀ alkyl. Specific embodiments include —O—P(O)(OH)—O—, —O—P(S)(OH)—O—, —O—P(S)(SH)—O—, —S—P(O)(OH)—O—, —O—P(O)(OH)—S—, —S—P(O)(OH)—S—, —O—P(S)(OH)—S—, —S—P(S)(OH)—O—, —O—P(O)(H)—O—, —O—P(S)(H)—O—, —S—P(O)(H)—O—, —S—P(S)(H)—O—, —S—P(O)(H)—S—, and —O—P(S)(H)—S—. Another specific embodiment is —O—P(O)(OH)—O—. These candidate linkers can be evaluated using methods analogous to those described above.

[0116] In other embodiments, the linkers may comprise acid cleavable groups, which are groups that are cleaved under acidic conditions. In some embodiments, acid cleavable groups are cleaved in an acidic environment with a pH of about 6.5 or lower (e.g., about 6.0, 5.5, 5.0, or lower), or by agents, such as enzymes that can act as a general acid. In a cell, specific low pH organelles, such as endosomes and lysosomes, can provide a cleaving environment for acid cleavable groups. Examples of acid cleavable linking groups include, but are not limited to, hydrazones, esters, and esters of amino acids. Acid cleavable groups can have the general formula —C═NN—, C(O)O, or —OC(O). A specific embodiment is when the carbon attached to the oxygen of the ester (the alkoxy group) is an aryl group, substituted alkyl group, or tertiary alkyl group such as dimethyl, pentyl or t-butyl. These candidates can be evaluated using methods analogous to those described above.

[0117] In other embodiments, the linkers may comprise ester-based cleavable groups, which are cleaved by enzymes, such as esterases and amidases in cells. Examples of ester-based cleavable groups include, but are not limited to, esters of alkylene, alkenylene and alkynylene groups. Ester cleavable groups have the general formula —C(O)O—, or —OC(O)—. These candidate linkers can be evaluated using methods analogous to those described above.

[0118] In further embodiments, the linkers may comprise peptide-based cleavable groups, which are cleaved by enzymes, such as peptidases and proteases in cells. Peptide-based cleavable groups are peptide bonds formed between amino acids to yield oligopeptides (e.g., dipeptides, tripeptides etc.) and polypeptides. Peptide-based cleavable groups include the amide group (—C(O)NH—). The amide group can be formed between any alkylene, alkenylene or alkynylene. A peptide bond is a special type of amide bond formed between amino acids to yield peptides and proteins. The peptide-based cleavage group is generally limited to the peptide bond (i.e., the amide bond) formed between amino acids yielding peptides and proteins. Peptide-based cleavable linking groups have the general formula —NHCHR^{A}C(O)NHCH^{B}C(O)—, where R^{A} and R^{B} are the side chains of the two adjacent amino acids. These candidates can be evaluated using methods analogous to those described above.

[0119] Other types of linkers suitable for attaching ligands to the sense or antisense strands in the RNAi constructs of the invention are known in the art and can include the linkers described in U.S. Pat. Nos. 7,723,509; 8,017,762; 8,828,956; 8,877,917; and 9,181,551, all of which are hereby incorporated by reference in their entireties.

[0120] In certain embodiments, the ligand covalently attached to the sense or antisense strand of the RNAi constructs of the invention comprises a GalNAc moiety, e.g, a multivalent GalNAc moiety. In some embodiments, the multivalent GalNAc moiety is a trivalent GalNAc moiety and is attached to the 3′ end of the sense strand. In other embodiments, the multivalent GalNAc moiety is a trivalent GalNAc moiety and is attached to the 5′ end of the sense strand. In yet other embodiments, the multivalent GalNAc moiety is a tetravalent GalNAc moiety and is attached to the 3′ end of the sense strand. In still other embodiments, the multivalent GalNAc moiety is a tetravalent GalNAc moiety and is attached to the 5′ end of the sense strand.

[0121] In certain embodiments, the RNAi constructs of the invention comprise a ligand having the following structure ([Structure 1]):

[chemical structure]

In preferred embodiments, the ligand having this structure is covalently attached to the 5′ end of the sense strand (e.g. to the 5′ terminal nucleotide of the sense strand) via a linker, such as the linkers described herein. In one embodiment, the linker is an aminohexyl linker.

[0122] Exemplary trivalent and tetravalent GalNAc moieties and linkers that can be attached to the double-stranded RNA molecules in the RNAi constructs of the invention are provided in the structural formulas I-IX below. “Ac” in the formulas listed herein represents an acetyl group.

[0123] In one embodiment, the RNAi construct comprises a ligand and linker having the following structure of Formula I, wherein each n is independently 1 to 3, k is 1 to 3, m is 1 or 2, j is 1 or 2, and the ligand is attached to the 3′ end of the sense strand of the double-stranded RNA molecule (represented by the solid wavy line):

[chemical structure]

[0124] In another embodiment, the RNAi construct comprises a ligand and linker having the following structure of Formula II, wherein each n is independently 1 to 3, k is 1 to 3, m is 1 or 2, j is 1 or 2, and the ligand is attached to the 3′ end of the sense strand of the double-stranded RNA molecule (represented by the solid wavy line):

[chemical structure]

[0125] In yet another embodiment, the RNAi construct comprises a ligand and linker having the following structure of Formula III, wherein the ligand is attached to the 3′ end of the sense strand of the double-stranded RNA molecule (represented by the solid wavy line):

[chemical structure]

[0126] In still another embodiment, the RNAi construct comprises a ligand and linker having the following structure of Formula IV, wherein the ligand is attached to the 3′ end of the sense strand of the double-stranded RNA molecule (represented by the solid wavy line):

[chemical structure]

[0127] In certain embodiments, the RNAi construct comprises a ligand and linker having the following structure of Formula V, wherein each n is independently 1 to 3, k is 1 to 3, and the ligand is attached to the 5′ end of the sense strand of the double-stranded RNA molecule (represented by the solid wavy line):

[chemical structure]

[0128] In other embodiments, the RNAi construct comprises a ligand and linker having the following structure of Formula VI, wherein each n is independently 1 to 3, k is 1 to 3, and the ligand is attached to the 5′ end of the sense strand of the double-stranded RNA molecule (represented by the solid wavy line):

[chemical structure]

[0129] In one particular embodiment, the RNAi construct comprises a ligand and linker having the following structure of Formula VII, wherein X=O or S and wherein the ligand is attached to the 5′ end of the sense strand of the double-stranded RNA molecule (represented by the squiggly line):

[chemical structure]

[0130] In some embodiments, the RNAi construct comprises a ligand and linker having the following structure of Formula VIII, wherein each n is independently 1 to 3 and the ligand is attached to the 5′ end of the sense strand of the double-stranded RNA molecule (represented by the solid wavy line):

[chemical structure]

[0131] In certain embodiments, the RNAi construct comprises a ligand and linker having the following structure of Formula IX, wherein the ligand is attached to the 5′ end of the sense strand of the double-stranded RNA molecule (represented by the solid wavy line):

[chemical structure]

[0132] A phosphorothioate bond can be substituted for the phosphodiester bond shown in any one of Formulas I-IX to covalently attach the ligand and linker to the nucleic acid strand.

[0133] The present invention also includes pharmaceutical compositions and formulations comprising the RNAi constructs described herein and pharmaceutically acceptable carriers, excipients, or diluents. Such compositions and formulations are useful for reducing expression of the MARC1 gene in a patient in need thereof. Where clinical applications are contemplated, pharmaceutical compositions and formulations will be prepared in a form appropriate for the intended application. Generally, this will entail preparing compositions that are essentially free of pyrogens, as well as other impurities that could be harmful to humans or animals.

[0134] The phrases “pharmaceutically acceptable” or “pharmacologically acceptable” refer to molecular entities and compositions that do not produce adverse, allergic, or other untoward reactions when administered to an animal or a human. As used herein, “pharmaceutically acceptable carrier, excipient, or diluent” includes solvents, buffers, solutions, dispersion media, coatings, antibacterial and antifungal agents, isotonic and absorption delaying agents and the like acceptable for use in formulating pharmaceuticals, such as pharmaceuticals suitable for administration to humans. The use of such media and agents for pharmaceutically active substances is well known in the art. Except insofar as any conventional media or agent is incompatible with the RNAi constructs of the present invention, its use in therapeutic compositions is contemplated. Supplementary active ingredients also can be incorporated into the compositions, provided they do not inactivate the RNAi constructs of the compositions.

[0135] Compositions and methods for the formulation of pharmaceutical compositions depend on a number of criteria, including, but not limited to, route of administration, type and extent of disease or disorder to be treated, or dose to be administered. In some embodiments, the pharmaceutical compositions are formulated based on the intended route of delivery. For instance, in certain embodiments, the pharmaceutical compositions are formulated for parenteral delivery. Parenteral forms of delivery include intravenous, intraarterial, subcutaneous, intrathecal, intraperitoneal or intramuscular injection or infusion. In one embodiment, the pharmaceutical composition is formulated for intravenous delivery. In such an embodiment, the pharmaceutical composition may include a lipid-based delivery vehicle. In another embodiment, the pharmaceutical composition is formulated for subcutaneous delivery. In such an embodiment, the pharmaceutical composition may include a targeting ligand (e.g. GalNAc-containing or antibody-containing ligands described herein).

[0136] In some embodiments, the pharmaceutical compositions comprise an effective amount of an RNAi construct described herein. An “effective amount” is an amount sufficient to produce a beneficial or desired clinical result. In some embodiments, an effective amount is an amount sufficient to reduce MARC1 gene expression in a particular tissue or cell-type (e.g. liver or hepatocytes) of a patient. An effective amount of an RNAi construct of the invention may be from about 0.01 mg/kg body weight to about 100 mg/kg body weight, and may be administered daily, weekly, monthly, or at longer intervals. The precise determination of what would be considered an effective amount and frequency of administration may be based on several factors, including a patient's size, age, and general condition, type of disorder to be treated (e.g. fatty liver disease, liver fibrosis, or cardiovascular disease), particular RNAi construct employed, and route of administration.

[0137] Administration of the pharmaceutical compositions of the present invention may be via any common route so long as the target tissue is available via that route. Such routes include, but are not limited to, parenteral (e.g., subcutaneous, intramuscular, intraperitoneal or intravenous), oral, nasal, buccal, intradermal, transdermal, and sublingual routes, or by direct injection into liver tissue or delivery through the hepatic portal vein. In some embodiments, the pharmaceutical composition is administered parenterally. For instance, in certain embodiments, the pharmaceutical composition is administered intravenously. In other embodiments, the pharmaceutical composition is administered subcutaneously.

[0138] Colloidal dispersion systems, such as macromolecule complexes, nanocapsules, microspheres, beads, and lipid-based systems, including oil-in-water emulsions, micelles, mixed micelles, and liposomes, may be used as delivery vehicles for the RNAi constructs of the invention. Commercially available fat emulsions that are suitable for delivering the nucleic acids of the invention include Intralipid® (Baxter International Inc.), Liposyn® (Abbott Pharmaceuticals), Liposyn®II (Hospira), Liposyn®III (Hospira), Nutrilipid (B. Braun Medical Inc.), and other similar lipid emulsions. An exemplary colloidal system for use as a delivery vehicle in vivo is a liposome (i.e., an artificial membrane vesicle). The RNAi constructs of the invention may be encapsulated within liposomes or may form complexes thereto, in particular to cationic liposomes. Alternatively, RNAi constructs of the invention may be complexed to lipids, in particular to cationic lipids. Suitable lipids and liposomes include neutral (e.g., dioleoylphosphatidyl ethanolamine (DOPE), dimyristoylphosphatidyl choline (DMPC), and dipalmitoyl phosphatidylcholine (DPPC)), distearolyphosphatidyl choline), negative (e.g., dimyristoylphosphatidyl glycerol (DMPG)), and cationic (e.g., dioleoyltetramethylaminopropyl (DOTAP) and dioleoylphosphatidyl ethanolamine (DOTMA)). The preparation and use of such colloidal dispersion systems are well known in the art. Exemplary formulations are also disclosed in U.S. Pat. Nos. 5,981,505; 6,217,900; 6,383,512; 5,783,565; 7,202,227; 6,379,965; 6,127,170; 5,837,533; 6,747,014; and WIPO Publication No. WO 03/093449.

[0139] In some embodiments, the RNAi constructs of the invention are fully encapsulated in a lipid formulation, e.g., to form a SNALP or other nucleic acid-lipid particle. As used herein, the term “SNALP” refers to a stable nucleic acid-lipid particle. SNALPs typically contain a cationic lipid, a non-cationic lipid, and a lipid that prevents aggregation of the particle (e.g., a PEG-lipid conjugate). SNALPs are exceptionally useful for systemic applications, as they exhibit extended circulation lifetimes following intravenous injection and accumulate at distal sites (e.g., sites physically separated from the administration site). The nucleic acid-lipid particles typically have a mean diameter of about 50 nm to about 150 nm, about 60 nm to about 130 nm, about 70 nm to about 110 nm, or about 70 nm to about 90 nm, and are substantially nontoxic. In addition, the nucleic acids when present in the nucleic acid-lipid particles are resistant in aqueous solution to degradation with a nuclease. Nucleic acid-lipid particles and their method of preparation are disclosed in, e.g., U.S. Pat. Nos. 5,976,567; 5,981,501; 6,534,484; 6,586,410; 6,815,432; and WIPO Publication No. WO 96/40964.

[0140] The pharmaceutical compositions suitable for injectable use include, for example, sterile aqueous solutions or dispersions and sterile powders for the extemporaneous preparation of sterile injectable solutions or dispersions. Generally, these preparations are sterile and fluid to the extent that easy injectability exists. Preparations should be stable under the conditions of manufacture and storage and should be preserved against the contaminating action of microorganisms, such as bacteria and fungi. Appropriate solvents or dispersion media may contain, for example, water, ethanol, polyol (for example, glycerol, propylene glycol, and liquid polyethylene glycol, and the like), suitable mixtures thereof, and vegetable oils. The proper fluidity can be maintained, for example, by the use of a coating, such as lecithin, by the maintenance of the required particle size in the case of dispersion and by the use of surfactants. The prevention of the action of microorganisms can be brought about by various antibacterial and antifungal agents, for example, parabens, chlorobutanol, phenol, sorbic acid, thimerosal, and the like. In many cases, it will be preferable to include isotonic agents, for example, sugars or sodium chloride. Prolonged absorption of the injectable compositions can be brought about by the use in the compositions of agents delaying absorption, for example, aluminum monostearate and gelatin.

[0141] Sterile injectable solutions may be prepared by incorporating the active compounds in an appropriate amount into a solvent along with any other ingredients (for example as enumerated above) as desired, followed by filtered sterilization. Generally, dispersions are prepared by incorporating the various sterilized active ingredients into a sterile vehicle which contains the basic dispersion medium and the desired other ingredients, e.g., as enumerated above. In the case of sterile powders for the preparation of sterile injectable solutions, the preferred methods of preparation include vacuum-drying and freeze-drying techniques which yield a powder of the active ingredient(s) plus any additional desired ingredient from a previously sterile-filtered solution thereof.

[0142] The compositions of the present invention generally may be formulated in a neutral or salt form. Pharmaceutically acceptable salts include, for example, acid addition salts (formed with free amino groups) derived from inorganic acids (e.g., hydrochloric or phosphoric acids), or from organic acids (e.g., acetic, oxalic, tartaric, mandelic, and the like). Salts formed with the free carboxyl groups can also be derived from inorganic bases (e.g., sodium, potassium, ammonium, calcium, or ferric hydroxides) or from organic bases (e.g., isopropylamine, trimethylamine, histidine, procaine and the like). Pharmaceutically acceptable salts are described in detail in Berge et al., J. Pharmaceutical Sciences, Vol. 66: 1-19, 1977.

[0143] For parenteral administration in an aqueous solution, for example, the solution generally is suitably buffered and the liquid diluent first rendered isotonic for example with sufficient saline or glucose. Such aqueous solutions may be used, for example, for intravenous, intramuscular, subcutaneous and intraperitoneal administration. Preferably, sterile aqueous media are employed as is known to those of skill in the art, particularly in light of the present disclosure. By way of illustration, a single dose may be dissolved in 1 ml of isotonic NaCl solution and either added to 1000 ml of hypodermoclysis fluid or injected at the proposed site of infusion, (see for example, “Remington's Pharmaceutical Sciences” 15th Edition, pages 1035-1038 and 1570-1580). For human administration, preparations should meet sterility, pyrogenicity, general safety and purity standards as required by FDA standards. In certain embodiments, a pharmaceutical composition of the invention comprises or consists of a sterile saline solution and an RNAi construct described herein. In other embodiments, a pharmaceutical composition of the invention comprises or consists of an RNAi construct described herein and sterile water (e.g. water for injection, WFI). In still other embodiments, a pharmaceutical composition of the invention comprises or consists of an RNAi construct described herein and phosphate-buffered saline (PBS).

[0144] In some embodiments, the pharmaceutical compositions of the invention are packaged with or stored within a device for administration. Devices for injectable formulations include, but are not limited to, injection ports, pre-filled syringes, autoinjectors, injection pumps, on-body injectors, and injection pens. Devices for aerosolized or powder formulations include, but are not limited to, inhalers, insufflators, aspirators, and the like. Thus, the present invention includes administration devices comprising a pharmaceutical composition of the invention for treating or preventing one or more of the diseases or disorders described herein.

[0145] The present invention provides a method for reducing or inhibiting expression of the MARC1 gene, and thus the production of mARC1 protein, in a cell (e.g. liver cell) by contacting the cell with any one of the RNAi constructs described herein. The cell may be in vitro or in vivo. mARC1 expression can be assessed by measuring the amount or level of mARC1 mRNA, mARC1 protein, or another biomarker linked to mARC1 expression, such as serum levels of cholesterol, LDL-cholesterol, or liver enzymes, such as alanine aminotransferase (ALT). The reduction of mARC1 expression in cells or animals treated with an RNAi construct of the invention can be determined relative to the mARC1 expression in cells or animals not treated with the RNAi construct or treated with a control RNAi construct. For instance, in some embodiments, reduction of mARC1 expression is assessed by (a) measuring the amount or level of mARC1 mRNA in liver cells treated with an RNAi construct of the invention, (b) measuring the amount or level of mARC1 mRNA in liver cells treated with a control RNAi construct (e.g. RNAi construct directed to an RNA molecule not expressed in liver cells or a RNAi construct having a nonsense or scrambled sequence) or no construct, and (c) comparing the measured mARC1 mRNA levels from treated cells in (a) to the measured mARC1 mRNA levels from control cells in (b). The mARC1 mRNA levels in the treated cells and controls cells can be normalized to RNA levels for a control gene (e.g. 18S ribosomal RNA or housekeeping gene) prior to comparison. mARC1 mRNA levels can be measured by a variety of methods, including Northern blot analysis, nuclease protection assays, fluorescence in situ hybridization (FISH), reverse-transcriptase (RT)-PCR, real-time RT-PCR, quantitative PCR, droplet digital PCR, and the like.

[0146] In other embodiments, reduction of mARC1 expression is assessed by (a) measuring the amount or level of mARC1 protein in liver cells treated with an RNAi construct of the invention, (b) measuring the amount or level of mARC1 protein in liver cells treated with a control RNAi construct (e.g. RNAi construct directed to an RNA molecule not expressed in liver cells or a RNAi construct having a nonsense or scrambled sequence) or no construct, and (c) comparing the measured mARC1 protein levels from treated cells in (a) to the measured mARC1 protein levels from control cells in (b). Methods of measuring mARC1 protein levels are known to those of skill in the art, and include Western Blots, immunoassays (e.g. ELISA), and flow cytometry. Any method capable of measuring mARC1 mRNA or mARC1 protein can be used to assess the efficacy of the RNAi constructs of the invention.

[0147] In some embodiments, the methods to assess mARC1 expression levels are performed in vitro in cells that natively express mARC1 (e.g. liver cells) or cells that have been engineered to express mARC1. In certain embodiments, the methods are performed in vitro in liver cells. Suitable liver cells include, but are not limited to, primary hepatocytes (e.g. human or non-human primate hepatocytes), HepAD38 cells, HuH-6 cells, HuH-7 cells, HuH-5-2 cells, BNLCL2 cells, Hep3B cells, or HepG2 cells. In one embodiment, the liver cells are HuH-7 cells. In another embodiment, the liver cells are human primary hepatocytes. In yet another embodiment, the liver cells are Hep3B cells.

[0148] In other embodiments, the methods to assess mARC1 expression levels are performed in vivo. The RNAi constructs and any control RNAi constructs can be administered to an animal and mARC1 mRNA or mARC1 protein levels assessed in liver tissue harvested from the animal following treatment. Alternatively or additionally, a biomarker or functional phenotype associated with mARC1 expression can be assessed in the treated animals. For instance, MARC1 loss of function variants have been associated with reduced serum total cholesterol, LDL-cholesterol, and liver enzyme levels (see Emdin et al., PLoS Genet, Vol. 16(4): e1008629, 2020). Thus, serum or plasma levels of cholesterol, LDL-cholesterol, or liver enzymes (e.g. ALT) can be measured in animals treated with RNAi constructs of the invention to assess the functional efficacy of reducing mARC1 expression. Exemplary methods for measuring serum or plasma cholesterol or enzyme levels are described in Examples 1, 4, and 5.

[0149] In certain embodiments, expression of mARC1 mRNA or protein is reduced in liver cells by at least 40%, at least 45%, or at least 50% by an RNAi construct of the invention. In some embodiments, expression of mARC1 mRNA or protein is reduced in liver cells by at least 60%, at least 65%, at least 70%, at least 75%, at least 80%, or at least 85% by an RNAi construct of the invention. In other embodiments, the expression of mARC1 mRNA or protein is reduced in liver cells by about 90% or more, e.g., 91%, 92%, 93%, 94%, 95%, 96%, 97%, 98%, 99%, or more by an RNAi construct of the invention. The percent reduction of mARC1 expression can be measured by any of the methods described herein as well as others known in the art.

[0150] The present invention provides methods for reducing or inhibiting expression of the MARC1 gene, and thus the production of mARC1 protein, in a patient in need thereof as well as methods of treating or preventing conditions, diseases, or disorders associated with mARC1 expression or activity. A “condition, disease, or disorder associated with mARC1 expression” refers to conditions, diseases, or disorders in which mARC1 expression levels are altered or where elevated expression levels of mARC1 are associated with an increased risk of developing the condition, disease or disorder. A condition, disease, or disorder associated with mARC1 expression can also include conditions, diseases, or disorders resulting from aberrant changes in lipoprotein metabolism, such as changes resulting in abnormal or elevated levels of cholesterol, lipids, triglycerides, etc. or impaired clearance of these molecules. Recent genetic studies have reported an association between loss-of-function variants in the MARC1 gene and decreased blood levels of cholesterol and liver enzymes, reduced liver fat, and protection from cirrhosis (Spracklen et al., Hum Mol Genet., Vol. 26(9):1770-178, 2017; Emdin et al., bioRxiv 594523; //doi.org/10.1101/594523, 2019; and Emdin et al., PLoS Genet, Vol. 16(4): e1008629, 2020)). See Emdin et al., bioRxiv 594523; //doi.org/10.1101/594523, 2019; and Emdin et al., PLoS Genet, Vol. 16(4): e1008629, 2020). Thus, in certain embodiments, the RNAi constructs of the invention are particularly useful for treating or preventing fatty liver disease (e.g. NAFLD and NASH) and cardiovascular disease (e.g. coronary artery disease and myocardial infarction) as well as reducing liver fibrosis and serum cholesterol levels.

[0151] Conditions, diseases, and disorders associated with mARC1 expression that can be treated or prevented according to the methods of the invention include, but are not limited to, fatty liver disease, such as alcoholic fatty liver disease, alcoholic steatohepatitis, NAFLD and NASH; chronic liver disease; cirrhosis; cardiovascular disease, such as myocardial infarction, heart failure, stroke (ischemic and hemorrhagic), atherosclerosis, coronary artery disease, peripheral vascular disease (e.g. peripheral artery disease), cerebrovascular disease, vulnerable plaque, and aortic valve stenosis; familial hypercholesterolemia; venous thrombosis; hypercholesterolemia; hyperlipidemia; and dyslipidemia (manifesting, e.g., as elevated total cholesterol, elevated low-density lipoprotein (LDL), elevated very low-density lipoprotein (VLDL), elevated triglycerides, and/or low levels of high-density lipoprotein (HDL)).

[0152] In certain embodiments, the present invention provides a method for reducing the expression of mARC1 protein in a patient in need thereof comprising administering to the patient any of the RNAi constructs described herein. The term “patient,” as used herein, refers to a mammal, including humans, and can be used interchangeably with the term “subject.” Preferably, the expression level of mARC1 in hepatocytes in the patient is reduced following administration of the RNAi construct as compared to the mARC1 expression level in a patient not receiving the RNAi construct or as compared to the mARC1 expression level in the patient prior to administration of the RNAi construct. In some embodiments, following administration of an RNAi construct of the invention, expression of mARC1 is reduced in the patient by at least 30%, at least 35%, at least 40%, at least 45%, at least 50%, at least 55%, at least 60%, at least 65%, at least 70%, at least 75%, at least 80%, at least 85%, or at least 90%, e.g., 91%, 92%, 93%, 94%, 95%, 96%, 97%, 98%, or 99%. The percent reduction of mARC1 expression can be measured by any of the methods described herein as well as others known in the art. In certain embodiments, the percent reduction of mARC1 expression is determined by assessing levels of a serum or plasma biomarker, such as total cholesterol, LDL-cholesterol, or liver enzyme (e.g. ALT) levels, in the patient according to methods described herein.

[0153] In some embodiments, a patient in need of reduction of mARC1 expression is a patient who is at risk of having a myocardial infarction. A patient who is at risk of having a myocardial infarction may be a patient who has a history of myocardial infarction (e.g. has had a previous myocardial infarction). A patient at risk of having a myocardial infarction may also be a patient who has a familial history of myocardial infarction or who has one or more risk factors of myocardial infarction. Such risk factors include, but are not limited to, hypertension, elevated levels of non-HDL cholesterol, elevated levels of triglycerides, diabetes, obesity, or history of autoimmune diseases (e.g. rheumatoid arthritis, lupus). In one embodiment, a patient who is at risk of having a myocardial infarction is a patient who has or is diagnosed with coronary artery disease. The risk of myocardial infarction in these and other patients can be reduced by administering to the patients any of the RNAi constructs described herein. Accordingly, the present invention provides a method for reducing the risk of myocardial infarction in a patient in need thereof comprising administering to the patient an RNAi construct described herein. In some embodiments, the present invention includes use of any of the RNAi constructs described herein in the preparation of a medicament for reducing the risk of myocardial infarction in a patient in need thereof. In other embodiments, the present invention provides a mARC1-targeting RNAi construct for use in a method for reducing the risk of myocardial infarction in a patient in need thereof.

[0154] In certain embodiments, a patient in need of reduction of mARC1 expression is a patient who is diagnosed with or at risk of cardiovascular disease. Thus, the present invention includes a method for treating or preventing cardiovascular disease in a patient in need thereof by administering any of the RNAi constructs of the invention. In some embodiments, the present invention includes use of any of the RNAi constructs described herein in the preparation of a medicament for treating or preventing cardiovascular disease in a patient in need thereof. In other embodiments, the present invention provides a mARC1-targeting RNAi construct for use in a method for treating or preventing cardiovascular disease in a patient in need thereof. Cardiovascular disease includes, but is not limited to, myocardial infarction, heart failure, stroke (ischemic and hemorrhagic), atherosclerosis, coronary artery disease, peripheral vascular disease (e.g. peripheral artery disease), cerebrovascular disease, vulnerable plaque, and aortic valve stenosis. In some embodiments, the cardiovascular disease to be treated or prevented according to the methods of the invention is coronary artery disease. In other embodiments, the cardiovascular disease to be treated or prevented according to the methods of the invention is myocardial infarction. In yet other embodiments, the cardiovascular disease to be treated or prevented according to the methods of the invention is stroke. In still other embodiments, the cardiovascular disease to be treated or prevented according to the methods of the invention is peripheral artery disease. In certain embodiments, administration of the RNAi constructs described herein reduces the risk of non-fatal myocardial infarctions, fatal and non-fatal strokes, certain types of heart surgery (e.g. angioplasty, bypass), hospitalization for heart failure, chest pain in patients with heart disease, and/or cardiovascular events in patients with established heart disease (e.g. prior myocardial infarction, prior heart surgery, and/or chest pain with evidence of blocked arteries). In some embodiments, administration of the RNAi constructs described herein according to the methods of the invention can be used to reduce the risk of recurrent cardiovascular events.

[0155] In some embodiments, a patient to be treated according to the methods of the invention is a patient who has a vulnerable plaque (also referred to as unstable plaque). Vulnerable plaques are a build-up of macrophages and lipids containing predominantly cholesterol that lie underneath the endothelial lining of the arterial wall. These vulnerable plaques can rupture resulting in the formation of a blood clot, which can potentially block blood flow through the artery and cause a myocardial infarction or stroke. Vulnerable plaques can be identified by methods known in the art, including, but not limited to, intravascular ultrasound and computed tomography (see Sahara et al., European Heart Journal, Vol. 25: 2026-2033, 2004; Budhoff, J. Am. Coll. Cardiol., Vol. 48: 319-321, 2006; Hausleiter et al., J. Am. Coll. Cardiol., Vol. 48: 312-318, 2006).

[0156] In other embodiments, a patient in need of reduction of mARC1 expression is a patient who has elevated blood levels of cholesterol (e.g. total cholesterol, non-HDL cholesterol, or LDL cholesterol). Accordingly, in some embodiments, the present invention provides a method for reducing blood levels (e.g. serum or plasma) of cholesterol in a patient in need thereof comprising administering to the patient any of the RNAi constructs described herein. In some embodiments, the present invention includes use of any of the RNAi constructs described herein in the preparation of a medicament for reducing blood levels (e.g. serum or plasma) of cholesterol in a patient in need thereof. In other embodiments, the present invention provides a mARC1-targeting RNAi construct for use in a method for reducing blood levels (e.g. serum or plasma) of cholesterol in a patient in need thereof. In certain embodiments, the cholesterol reduced according to the methods of the invention is LDL cholesterol. In other embodiments, the cholesterol reduced according to the methods of the invention is non-HDL cholesterol. Non-HDL cholesterol is a measure of all cholesterol-containing proatherogenic lipoproteins, including LDL cholesterol, very low-density lipoprotein, intermediate-density lipoprotein, lipoprotein(a), chylomicron, and chylomicron remnants. Non-HDL cholesterol has been reported to be a good predictor of cardiovascular risk (Rana et al., Curr. Atheroscler. Rep., Vol. 14:130-134, 2012). Non-HDL cholesterol levels can be calculated by subtracting HDL cholesterol levels from total cholesterol levels.

[0157] In some embodiments, a patient to be treated according to the methods of the invention is a patient who has elevated levels of non-HDL cholesterol (e.g. elevated serum or plasma levels of non-HDL cholesterol). Ideally, levels of non-HDL cholesterol should be about 30 mg/dL above the target for LDL cholesterol levels for any given patient. In particular embodiments, a patient is administered an RNAi construct of the invention if the patient has a non-HDL cholesterol level of about 130 mg/dL or greater. In one embodiment, a patient is administered an RNAi construct of the invention if the patient has a non-HDL cholesterol level of about 160 mg/dL or greater. In another embodiment, a patient is administered an RNAi construct of the invention if the patient has a non-HDL cholesterol level of about 190 mg/dL or greater. In still another embodiment, a patient is administered an RNAi construct of the invention if the patient has a non-HDL cholesterol level of about 220 mg/dL or greater. In certain embodiments, a patient is administered an RNAi construct of the invention if the patient is at a high or very high risk of cardiovascular disease according to the 2013 ACC/AHA Guideline on the Assessment of Cardiovascular Risk (Goff et al., ACC/AHA guideline on the assessment of cardiovascular risk: a report of the American College of Cardiology/American Heart Association Task Force on Practice Guidelines. J Am Coll Cardiol, Vol. 63:2935-2959, 2014) and has a non-HDL cholesterol level of about 100 mg/dL or greater.

[0158] In certain embodiments of the methods of the invention, a patient is administered an RNAi construct described herein if they are at a moderate risk or higher for cardiovascular disease according to the 2013 ACC/AHA Guideline on the Assessment of Cardiovascular Risk (referred to herein as the “2013 Guidelines”). In certain embodiments, an RNAi construct of the invention is administered to a patient if the patient's LDL cholesterol level is greater than about 160 mg/dL. In other embodiments, an RNAi construct of the invention is administered to a patient if the patient's LDL cholesterol level is greater than about 130 mg/dL and the patient has a moderate risk of cardiovascular disease according to the 2013 Guidelines. In still other embodiments, an RNAi construct of the invention is administered to a patient if the patient's LDL cholesterol level is greater than 100 mg/dL and the patient has a high or very high risk of cardiovascular disease according to the 2013 Guidelines.

[0159] In other embodiments, a patient in need of reduction of mARC1 expression is a patient who is diagnosed with or at risk of fatty liver disease. Thus, the present invention includes a method for treating, preventing, or reducing the risk of developing fatty liver disease in a patient in need thereof comprising administering to the patient any of the RNAi constructs of the invention. In some embodiments, the present invention includes use of any of the RNAi constructs described herein in the preparation of a medicament for treating, preventing, or reducing the risk of developing fatty liver disease in a patient in need thereof. In other embodiments, the present invention provides a mARC1-targeting RNAi construct for use in a method for treating, preventing, or reducing the risk of developing fatty liver disease in a patient in need thereof. Fatty liver disease is a condition in which fat accumulates in the liver. There are two primary types of fatty liver disease: a first type that is associated with heavy alcohol use (alcoholic steatohepatitis) and a second type that is not related to use of alcohol (nonalcoholic fatty liver disease (NAFLD)). NAFLD is typically characterized by the presence of fat accumulation in the liver but little or no inflammation or liver cell damage. NAFLD can progress to nonalcoholic steatohepatitis (NASH), which is characterized by liver inflammation and cell damage, both of which in turn can lead to liver fibrosis and eventually cirrhosis or hepatic cancer. In certain embodiments, the fatty liver disease to be treated, prevented, or reduce the risk of developing according to the methods of the invention is NAFLD. In other embodiments, the fatty liver disease to be treated, prevented, or reduce the risk of developing according to the methods of the invention is NASH. In still other embodiments, the fatty liver disease to be treated, prevented, or reduce the risk of developing according to the methods of the invention is alcoholic steatohepatitis. In some embodiments, a patient in need of treatment or prevention for fatty liver disease according to the methods of the invention or is at risk of developing fatty liver disease has been diagnosed with type 2 diabetes, a metabolic disorder, or is obese (e.g. body mass index of ≥30.0). In other embodiments, a patient in need of treatment or prevention for fatty liver disease according to the methods of the invention or is at risk of developing fatty liver disease has elevated levels of non-HDL cholesterol or triglycerides. Depending on the particular patient and other risk factors that patient may have, elevated levels of non-HDL cholesterol may be about 130 mg/dL or greater, about 160 mg/dL or greater, about 190 mg/dL or greater, or about 220 mg/dL or greater. Elevated triglyceride levels may be about 150 mg/dL or greater, about 175 mg/dL or greater, about 200 mg/dL or greater, or about 250 mg/dL or greater.

[0160] In certain embodiments, a patient in need of reduction of mARC1 expression is a patient who is diagnosed with or at risk of developing hepatic fibrosis or cirrhosis. Accordingly, the present invention encompasses a method for treating, preventing, or reducing liver fibrosis in a patient in need thereof comprising administering to the patient any of the RNAi constructs of the invention. In some embodiments, the present invention includes use of any of the RNAi constructs described herein in the preparation of a medicament for treating, preventing, or reducing liver fibrosis in a patient in need thereof. In other embodiments, the present invention provides a mARC1-targeting RNAi construct for use in a method for treating, preventing, or reducing liver fibrosis in a patient in need thereof. In some embodiments, a patient at risk for developing hepatic fibrosis or cirrhosis is diagnosed with NAFLD. In other embodiments, a patient at risk for developing hepatic fibrosis or cirrhosis is diagnosed with NASH. In yet other embodiments, a patient at risk for developing hepatic fibrosis or cirrhosis is diagnosed with alcoholic steatohepatitis. In still other embodiments, a patient at risk for developing hepatic fibrosis or cirrhosis is diagnosed with hepatitis. In certain embodiments, administration of an RNAi construct of the invention prevents or delays the development of cirrhosis in the patient.

[0161] The following examples, including the experiments conducted and the results achieved, are provided for illustrative purposes only and are not to be construed as limiting the scope of the appended claims.

### EXAMPLES

### Example 1. Inhibition of mARC1 Expression in Ob/Ob Animals Regulates Lipid Levels

[0162] Genetic studies have reported an association between the A165T missense mutation in the MARC1 gene and reduced serum low-density lipoprotein (LDL)-cholesterol and total cholesterol levels (Spracklen et al., Hum Mol Genet., Vol. 26(9):1770-178, 2017; Emdin et al., bioRxiv 594523; //doi.org/10.1101/594523, 2019; and Emdin et al., PLoS Genet, Vol. 16(4): e1008629, 2020)). This mutation as well as other loss of function variants of the MARC1 gene have also been recently associated with lower levels of hepatic fat, reduced liver enzyme levels, and reduced risk of cirrhosis (Emdin et al., 2019 and Emdin et al, 2020). To evaluate whether inhibition of mARC1 expression could reduce serum cholesterol levels as observed in human carriers of the MARC1 A165T variant allele, aged obese mice (ob/ob) were administered an siRNA molecule targeting the mouse Marc1 gene or a control siRNA molecule. Ob/ob mice are obese and have elevated lipid levels, and therefore these mice are often used as a model of type II diabetes and other metabolic disorders.

[0163] 18-20-week-old male ob/ob animals (The Jackson Laboratory) were fed standard chow (Harlan, 2020× Teklad global soy protein-free extruded rodent diet). Mice received, by subcutaneous injection, buffer (phosphate-buffered saline) alone (n=8), mARC1-targeted siRNA (duplex no. D-1000; n=8), or a control siRNA (duplex no. D-1002; n=8) at 3 mg/kg body weight in 0.2 ml buffer once every two weeks for six weeks. The siRNA molecules were synthesized and conjugated to a trivalent GalNAc moiety (structure shown in Formula VII) as described in Example 2 below. The structure of each of the siRNA molecules is provided in Tables 1 and 2 below. Animals were fasted and harvested on week 6 for further analysis. Liver total RNA from harvested animals was processed for qPCR analysis and serum parameters were measured by clinical analyzer (AU400 Chemistry Analyzer, Olympus). mRNA levels were first normalized to 18S ribosomal RNA levels in each liver sample, and then compared to the expression levels in the buffer alone group. Data were presented as relative fold over expression in the buffer alone group. Liver tissues were homogenized and extracted by isopropanol for total cholesterol and total triglyceride measurement (ThermoFisher, Infinity cholesterol and Infinity triglyceride reagents). All animal housing conditions and research protocols were approved by the Amgen Institutional Animal Care and Use Committee (IACUC). Mice were housed in a specified-pathogen free, AAALAC, Intl-accredited facility in ventilated microisolators. Procedures and housing rooms were positively pressured and regulated on a 12:12 dark:light cycle. All animals received reverse-osmosis purified water ad libitum via an automatic watering system.

[0164] Animals treated with the mARC1-targeted siRNA exhibited approximately an 80% reduction of mARC1 expression in the liver as compared to animals receiving buffer only injections (FIG. 2A). The reduction in mARC1 expression by the siRNA molecule was specific as liver expression of mARC2 mRNA was not affected (FIG. 2B). Treatment with the mARC1-targeted siRNA reduced serum high-density lipoprotein (HDL), LDL, and total cholesterol levels as well as serum levels of alanine aminotransferase (ALT) and C-reactive protein (CRP) (FIGS. 3A-3H). Triglyceride levels in the liver were also reduced in ob/ob animals receiving the mARC1-targeted siRNA (FIGS. 4A and 4B). Liver expression of fibrosis genes in animals receiving the mARC1-targeted siRNA were not significantly altered as compared to buffer-injected animals in this animal model (data not shown).

[0165] The results of this series of experiments show that specific inhibition of mARC1 expression in the liver with a mARC1-targeted siRNA molecule reduces serum cholesterol, LDL-cholesterol, ALT levels, and liver triglycerides, demonstrating a causal effect of mARC1 in lipid regulation in hepatocytes. The observed reductions in serum cholesterol, LDL-cholesterol, and ALT levels in the ob/ob animals treated with the mARC1-targeted siRNA are consistent with the reduced levels of these analytes observed in human carriers of the of the MARC1 A165T variant allele. Thus, inhibition of mARC1 expression with siRNA molecules, such as those described herein, may be useful to reduce cholesterol and triglyceride levels in patients with hypercholesterolemia or hyperlipidemic disorders and may be therapeutic for other liver disorders, such as nonalcoholic fatty liver disease, nonalcoholic steatohepatitis, alcoholic fatty liver disease, alcoholic steatohepatitis, liver fibrosis, and cirrhosis.

### Example 2. Design and Synthesis of mARC1 siRNA Molecules

[0166] Candidate sequences for the design of therapeutic siRNA molecules targeting the human MARC1 gene were identified using a bioinformatics analysis of the human MARC1 transcript, the sequence of which is provided herein as SEQ ID NO: 1 (Ensembl transcript no. ENST00000366910.9; see FIG. 1). Sequences were analyzed using an in-house siRNA design algorithm and selected if certain criteria were met. The bioinformatics analysis was conducted in two phases. In the first phase, sequences were evaluated for various features, including cross-reactivity with MARC1 transcripts from cynomolgus monkeys (Macaca fascicularis; NCBI Reference Sequence Nos.: XR_001490722.1, XR_001490722.1, XR_001490723.1, XR_001490726.1, XR_273285.2, XM_005540901.2, XR_273286.2, XM_005540898.2, and XM_005540899.2), sequence identity to other human, cynomolgus monkey, and rodent gene sequences, and for overlap with known human single nucleotide polymorphisms. In the second phase, selection criteria were adjusted to include sequences with specificity for only the human MARC1 transcript and to evaluate sequences for seed region matches to human microRNA (miRNA) sequences to predict off-target effects. Based on the results of the bioinformatics analysis, 665 sequences were selected for initial synthesis and in vitro testing.

[0167] RNAi constructs were synthesized using solid phase phosphoramidite chemistry. Synthesis was performed on a MerMade12 or MerMade192X (Bioautomation) instrument. Various chemical modifications, including 2′-fluoro modified nucleotides, 2′-O-methyl modified nucleotides, inverted abasic nucleotides, and phosphorothioate internucleotide linkages, were incorporated into the molecules. The RNAi constructs were generally formatted to be duplexes of 19-21 base pairs when annealed with either no overhangs (double bluntmer) or one or two overhangs of 2 nucleotides at the 3′ end of the antisense strand and/or the sense strand. For in vivo studies, the sense strands of the RNAi constructs were conjugated to a trivalent N-acetyl-galactosamine (GalNAc) moiety as described further below.

### Materials

[0168] Acetonitrile (DNA Synthesis Grade, AX0152-2505, EMD)

[0169] Capping Reagent A (80:10:10 (v/v/v) tetrahydrofuran/lutidine/acetic anhydride, BI0221/4000, EMD)

[0170] Capping Reagent B (16% 1-methylimidazole/tetrahydrofuran, BI0345/4000, EMD)

[0171] Activator Solution (0.25 M 5-(ethylthio)-1H-tetrazole (ETT) in acetonitrile, BI0152/0960, EMD)

[0172] Detritylation Reagent (3% dichloroacetic acid in dichloromethane, BI0830/4000, EMD)

[0173] Oxidation Reagent (0.02 M iodine in 70:20:10 (v/v/v) tetrahydrofuran/pyridine/water, BI0420/4000, EMD)

[0174] Diethylamine solution (20% DEA in acetonitrile, NC0017-0505, EMD)

[0175] Thiolation Reagent (0.05 M 5-N-[(dimethylamino)methylene]amino-3H-1,2,4-dithiazole-3-thione (BIOSULII/160K) in pyridine)

[0176] 5′-Aminohexyl linker phosphoramidite and 2′-methoxy and 2′-fluoro phosphoramidites of adenosine, guanosine, and cytosine (Thermo Fisher Scientific), 0.10 M in acetonitrile over Molecular Trap Packs (0.5 g per 30 mL, Bioautomation)

[0177] 2′-methoxy-uridine phosphoramidite (Thermo Fisher Scientific), 0.10 M in 90:10 (v/v) acetonitrile/DMF over Molecular Trap Packs (0.5 g per 30 mL, Bioautomation)

[0178] 2′-deoxy-reverse absaic phosphoramidite (ChemGenes), 0.10 M in acetonitrile over Molecular Trap Packs (0.5 g per 30 mL, Bioautomation)

[0179] CPG Support (Hi-Load Universal Support, 500A (BH5-3500-G1), 79.6 μmol/g, 0.126 g (10 μmol)) or 1 μmol Universal Synthesis Column, 500A, Pipette Style Body (MM5-3500-1, Bioautomation)

[0180] Ammonium hydroxide (concentrated, J. T. Baker)

### Synthesis

[0181] Reagent solutions, phosphoramidite solutions, and solvents were attached to the MerMade12 or MerMade192X instrument. Solid support was added to each column (4 mL SPE tube with top and bottom frit for 10 μmol), and the columns were affixed to the instrument. The columns were washed twice with acetonitrile. The phosphoramidite and reagent solution lines were purged. The synthesis was initiated using the Poseidon software. The synthesis was accomplished by repetition of the deprotection/coupling/oxidation/capping synthesis cycle. Specifically, to the solid support was added detritylation reagent to remove the 5′-dimethoxytrityl (DMT) protecting group. The solid support was washed with acetonitrile. To the support was added phosphoramidite and activator solution followed by incubation to couple the incoming nucleotide to the free 5′-hydroxyl group. The support was washed with acetonitrile. To the support was added oxidation or thiolation reagent to convert the phosphite triester to the phosphate triester or phosphorothioate. To the support was added capping reagents A and B to terminate any unreacted oligonucleotide chains. The support was washed with acetonitrile. After the final reaction cycle, the resin was washed with diethylamine solution to remove the 2-cyanoethyl protecting groups. The support was washed with acetonitrile and dried under vacuum.

### GalNAc Conjugation

[0182] Sense strands for conjugation to a trivalent GalNAc moiety (structure shown in Formula VII below) were prepared with a 5′-aminohexyl linker. After automated synthesis, the column was removed from the instrument and transferred to a vacuum manifold in a hood. The 5′-monomethoxytrityl (MMT) protecting group was removed from the solid support by successive treatments with 2 mL aliquots of 1% trifluoroacetic acid (TFA) in dichloromethane (DCM) with vacuum filtration. When the orange/yellow color was no longer observable in the eluent, the resin was washed with dichloromethane. The resin was washed with 5 mL of 10% diisopropylethylamine in N,N-dimethylformamide (DMF). In a separate vial a solution of GalNAc3-Lys2-Ahx (67 mg, 40 μmol) in DMF (0.5 mL), the structure and synthesis of which is described below, was prepared with 1,1,3,3-tetramethyluronium tetrafluoroborate (TATU, 12.83 mg, 40 μmol) and diisopropylethylamine (DIEA, 13.9 μL, 80 μmol). The activated coupling solution was added to the resin, and the column was capped and incubated at room temperature overnight. The resin was washed with DMF, DCM, and dried under vacuum.

### Cleavage

[0183] The synthesis columns were removed from the synthesizer or vacuum manifold and transferred to a cleavage apparatus. To the solid support was added 4×1 mL (for 10 μmol) or 4×250 μL (for 1 μmol) of concentrated ammonium hydroxide. The eluent was collected by gravity or light vacuum filtration into a 24- or 96-well deep well plate, respectively. The plate was sealed, bolted into a cleavage chuck (Bioautomation), and the mixture was heated at 55° C. for 4 h. The plate was moved to the freezer and cooled for 20 minutes before opening the cleavage chuck in the hood.

### Analysis and Purification

[0184] A portion of the cleavage solution was analyzed and purified by anion exchange chromatography. The pooled fractions were desalted by size exclusion chromatography and analyzed by ion pair-reversed phase high-performance liquid chromatograph-mass spectrometry (HPLC-MS). The pooled fractions were lyophilized to obtain a white amorphous powder.

### Analytical Anion Exchange Chromatography (AEX):

[0185] Column: Thermo DNAPac PA200RS (4.6×50 mm, 4 μm)

[0186] Instrument: Agilent 1100 HPLC

[0187] Buffer A: 20 mM sodium phosphate, 10% acetonitrile, pH 8.5

[0188] Buffer B: 20 mM sodium phosphate, 10% acetonitrile, pH 8.5, 1 M sodium bromide

[0189] Flow rate: 1 mL/min at 40° C.

[0190] Gradient: 20-65% B in 6.2 min

### Preparative Anion Exchange Chromatography (AEX):

[0191] Column: Tosoh TSK Gel SuperQ-SPW, 21×150 mm, 13 μm

[0192] Instrument: Agilent 1200 HPLC

[0193] Buffer A: 20 mM sodium phosphate, 10% acetonitrile, pH 8.5

[0194] Buffer B: 20 mM sodium phosphate, 10% acetonitrile, pH 8.5, 1 M sodium bromide

[0195] Flow rate: 8 mL/min

[0196] Injection volume: 5 mL

[0197] Gradient: 35-55% B over 40 min for sense strands and 50-100% B over 40 min for antisense strands

### Preparative Size Exclusion Chromatography (SEC):

[0198] Column: 3×GE Hi-Prep 26/10 in series

[0199] Instrument: GE AKTA Pure

[0200] Buffer: 20% ethanol in water

[0201] Flow Rate: 10 mL/min

[0202] Injection volume: 45 mL using sample loading pump

### Ion Pair-Reversed Phase (IP-RP) HPLC:

[0203] Column: Water Xbridge BEH OST C18, 2.5 μm, 2.1×50 mm

[0204] Instrument: Agilent 1100 HPLC

[0205] Buffer A: 15.7 mM DIEA, 50 mM hexafluoroisopropanol (HFIP) in water

[0206] Buffer B: 15.7 mM DIEA, 50 mM HFIP in 50:50 water/acetonitrile

[0207] Flow rate: 0.5 mL/min

[0208] Gradient: 10-30% B over 6 min

### Annealing

[0209] A small amount of the sense strand and the antisense strand were weighed into individual vials. To the vials was added phosphate buffered saline (PBS, Gibco) to an approximate concentration of 2 mM based on the dry weight. The actual sample concentration was measured on the NanoDrop One (ssDNA, extinction coefficient=33 μg/OD260). The two strands were then mixed in an equimolar ratio, and the sample was heated for 5 minutes in a 90° C. incubator and allowed to cool slowly to room temperature. The sample was analyzed by AEX. The duplex was registered and submitted for in vitro and in vivo testing as described in more detail in Examples 3 and 4 below.

### Preparation of GalNAc3-Lys2-Ahx

[chemical structure]

wherein X=O or S. The squiggly line represents the point of attachment to the 5′ terminal nucleotide of the sense strand of the RNAi construct. The GalNAc moiety was attached to the 5′ carbon of the 5′ terminal nucleotide of the sense strand except where an inverted abasic (invAb) deoxynucleotide was the 5′ terminal nucleotide and linked to the adjacent nucleotide via a 5′-5′ internucleotide linkage, in which case the GalNAc moiety was attached to the 3′ carbon of the inverted abasic deoxynucleotide.

[0211] To a 50 mL falcon tube was added Fmoc-Ahx-OH (1.13 g, 3.19 mmol) in DCM (30 mL) followed by DIEA (2.23 mL, 12.78 mmol). The solution was added to 2-Cl Trityl chloride resin (3.03 g, 4.79 mmol) in a 50 mL centrifuge tube and loaded onto a shaker for 2 h. The solvent was drained and the resin was washed with 17:2:1 DCM/MeOH/DIEA (30 ml×2), DCM (30 mL×4) and dried. The loading was determined to be 0.76 mmol/g with UV spectrophotometric detection at 290 nm.

[0212] 3 g of the loaded 2-Cl Trityl resin was suspended in 20% 4-methylpiperidine in DMF (20 mL), and after 30 min the solvent was drained. The process was repeated one more time, and the resin was washed with DMF (30 mL×3) and DCM (30 mL×3).

[0213] To a solution of Fmoc-Lys(ivDde)-OH (3.45 g, 6 mmol) in DMF (20 mL) was added TATU (1.94 g, 6 mmol) followed by DIEA (1.83 mL, 10.5 mmol). The solution was then added to the above deprotected resin, and the suspension was set on a shaker overnight. The solvent was drained and the resin was washed with DMF (30 mL×3) and DCM (30 mL×3).

[0214] The resin was treated with 20% 4-methylpiperidine in DMF (15 mL) and after 10 min the solvent was drained. The process was repeated one more time and the resin was washed with DMF (15 mL×4) and DCM (15 mL×4).

[0215] To a solution of Fmoc-Lys(Fmoc)-OH (3.54 g, 6 mmol) in DMF (20 mL) was added TATU (1.94 g, 6 mmol) followed by DIEA (1.83 mL, 10.5 mmol). The solution was then added to the above deprotected resin and the suspension was set on a shaker overnight. The solvent was drained and the resin was washed with DMF (30 mL×3) and DCM (30 mL×3).

[0216] The resin was treated with 5% hydrazine in DMF (20 mL) and after 5 min, the solvent was drained. The process was repeated four more times and the resin was washed with DMF (30 mL×4) and DCM (30 mL×4).

[0217] To a solution of 5-(((2R,3R,4R,5R,6R)-3-acetamido-4,5-diacetoxy-6-(acetoxymethyl)tetrahydro-2H-pyran-2-yl)oxy)pentanoic acid (4.47 g, 10 mmol) in DMF (40 mL) was added TATU (3.22 g, 10 mmol), and the solution was stirred for 5 min. DIEA (2.96 mL, 17 mmol) was added to the solution, and the mixture was then added to the resin above. The suspension was kept at room temperature overnight and the solvent was drained. The resin was washed with DMF (3×30 mL) and DCM (3×30 mL).

[0218] The resin was treated with 1% TFA in DCM (30 mL with 3% triisopropylsilane) and after 5 min, the solvent was drained. The process was repeated three more times, and the combined filtrate was concentrated in vacuo. The residue was triturated with diethyl ether (50 mL) and the suspension was filtered and dried to give the crude product. The crude product was purified with reverse phase chromatography and eluted with 0-20% of MeCN in water. The fractions were combined and lyophilized to give the product as a white solid.

[0219] Table 1 below lists the unmodified sense and antisense sequences for molecules prioritized from the bioinformatics analysis. The range of nucleotides targeted by siRNA molecules in each sequence family within the human MARC1 transcript (SEQ ID NO: 1) is also shown in Table 1. Duplex nos. D-1000 to D-1003 were designed to target the Marc1 mouse transcript and do not cross-react with the human MARC1 transcript. Table 2 provides the sequences of the sense and antisense strands with chemical modifications. Based on activity in in vitro cell-based assays and in vivo mouse studies as described in Examples 3 and 4, respectively, sequences targeting specific regions of the human MARC1 transcript were selected for structure-activity relationship (SAR) studies. The nucleotide sequences are listed according to the following notations: a, u, g, and c=corresponding 2′-O-methyl ribonucleotide; Af, Uf, Gf, and Cf=corresponding 2′-deoxy-2′-fluoro (“2′-fluoro”) ribonucleotide; and invAb=inverted abasic deoxynucleotide (i.e. abasic deoxynucleotide linked to adjacent nucleotide via a substituent at its 3′ position (a 3′-3′ linkage) when on the 3′ end of a strand or linked to adjacent nucleotide via a substituent at its 5′ position (a 5′-5′ internucleotide linkage) when on the 5′ end of a strand. Insertion of an “s” in the sequence indicates that the two adjacent nucleotides are connected by a phosphorothiodiester group (e.g. a phosphorothioate internucleotide linkage). Unless indicated otherwise, all other nucleotides are connected by 3′-5′ phosphodiester groups. [GalNAc3] represents the GalNAc moiety shown in Formula VII, which was covalently attached to the 5′ terminal nucleotide at the 5′ end of the sense strand via a phophodiester bond or a phoshorothioate bond when an “s” follows the [GalNAc3] notation. When an invAb nucleotide was the 5′ terminal nucleotide at the 5′ end of the sense strand, it was linked to the adjacent nucleotide via a 5′-5′ linkage and the GalNAc moiety was covalently attached to the 3′ carbon of the invAb nucleotide. Otherwise, the GalNAc moiety was covalently attached to the 5′ carbon of the 5′ terminal nucleotide of the sense strand.

TABLE 1
Unmodified mARC1 siRNA sequences

| | Target site | | | | |
|---|---|---|---|---|---|
| | within human | | | | |
| | MARC1 | | SEQ | | SEQ |
| Duplex | transcript | | ID | | ID |
| No. | (SEQ ID NO: 1) | Sense Sequence (5′-3′) | NO: | Antisense Sequence (5′-3′) | NO: |
| D-1000 | — | GAGCAAGCACUAUAUGGAAU | 2 | UUCCAUAUAGUGCUUGCUCGG | 671 |
| D-1001 | — | AGAAGUUCUCGGCAAAUGAU | 3 | UCAUUUGCCGAGAACUUCUGG | 672 |
| D-1002 | — | GAGCAAGCUGAAUUUGGAAU | 4 | UUCCAAAUUCAGCUUGCUCGG | 673 |
| D-1003 | — | AGAAGUUCAGCGCUAAUGAU | 5 | UCAUUAGCGCUGAACUUCUGG | 674 |
| D-1004 | 40-60 | GAAGGACGCACUGCUCUGAU | 6 | AAUCAGAGCAGUGCGUCCUUCUU | 675 |
| D-1005 | 42-62 | AGGACGCACUGCUCUGAUUG | 7 | ACAAUCAGAGCAGUGCGUCCUUU | 676 |
| D-1006 | 43-63 | GGACGCACUGCUCUGAUUGG | 8 | ACCAAUCAGAGCAGUGCGUCCUU | 677 |
| D-1007 | 45-65 | ACGCACUGCUCUGAUUGGCC | 9 | AGGCCAAUCAGAGCAGUGCGUUU | 678 |
| D-1008 | 50-70 | CUGCUCUGAUUGGCCCGGAA | 10 | AUUCCGGGCCAAUCAGAGCAGUU | 679 |
| D-1009 | 51-71 | UGCUCUGAUUGGCCCGGAAG | 11 | ACUUCCGGGCCAAUCAGAGCAUU | 680 |
| D-1010 | 52-72 | GCUCUGAUUGGCCCGGAAGG | 12 | ACCUUCCGGGCCAAUCAGAGCUU | 681 |
| D-1011 | 99-119 | CGGGGCCAAAGGCCGCACCU | 13 | AAGGUGCGGCCUUUGGCCCCGUU | 682 |
| D-1012 | 100-120 | GGGGCCAAAGGCCGCACCUU | 14 | AAAGGUGCGGCCUUUGGCCCCUU | 683 |
| D-1013 | 103-123 | GCCAAAGGCCGCACCUUCCC | 15 | AGGGAAGGUGCGGCCUUUGGCUU | 684 |
| D-1014 | 104-124 | CCAAAGGCCGCACCUUCCCC | 16 | AGGGGAAGGUGCGGCCUUUGGUU | 685 |
| D-1015 | 163-183 | CGCCACCUCGCGGAGAAGCC | 17 | UGGCUUCUCCGCGAGGUGGCGUU | 686 |
| D-1016 | 164-184 | GCCACCUCGCGGAGAAGCCA | 18 | AUGGCUUCUCCGCGAGGUGGCUU | 687 |
| D-1017 | 165-185 | CCACCUCGCGGAGAAGCCAG | 19 | ACUGGCUUCUCCGCGAGGUGGUU | 688 |
| D-1018 | 167-187 | ACCUCGCGGAGAAGCCAGCC | 20 | UGGCUGGCUUCUCCGCGAGGUUU | 689 |
| D-1019 | 473-493 | UGAUCAACCAGGAGGGAAAC | 21 | UGUUUCCCUCCUGGUUGAUCAUU | 690 |
| D-1020 | 475-495 | AUCAACCAGGAGGGAAACAU | 22 | AAUGUUUCCCUCCUGGUUGAUUU | 691 |
| D-1021 | 476-496 | UCAACCAGGAGGGAAACAUG | 23 | ACAUGUUUCCCUCCUGGUUGAUU | 692 |
| D-1022 | 477-497 | CAACCAGGAGGGAAACAUGG | 24 | ACCAUGUUUCCCUCCUGGUUGUU | 693 |
| D-1023 | 478-498 | AACCAGGAGGGAAACAUGGU | 25 | AACCAUGUUUCCCUCCUGGUUUU | 694 |
| D-1024 | 479-499 | ACCAGGAGGGAAACAUGGUU | 26 | UAACCAUGUUUCCCUCCUGGUUU | 695 |
| D-1025 | 501-521 | UGCUCGCCAGGAACCUCGCC | 27 | AGGCGAGGUUCCUGGCGAGCAUU | 696 |
| D-1026 | 503-523 | CUCGCCAGGAACCUCGCCUG | 28 | ACAGGCGAGGUUCCUGGCGAGUU | 697 |
| D-1027 | 510-530 | GGAACCUCGCCUGGUCCUGA | 29 | AUCAGGACCAGGCGAGGUUCCUU | 698 |
| D-1028 | 512-532 | AACCUCGCCUGGUCCUGAUU | 30 | AAAUCAGGACCAGGCGAGGUUUU | 699 |
| D-1029 | 513-533 | ACCUCGCCUGGUCCUGAUUU | 31 | AAAAUCAGGACCAGGCGAGGUUU | 700 |
| D-1030 | 514-534 | CCUCGCCUGGUCCUGAUUUC | 32 | AGAAAUCAGGACCAGGCGAGGUU | 701 |
| D-1031 | 515-535 | CUCGCCUGGUCCUGAUUUCC | 33 | AGGAAAUCAGGACCAGGCGAGUU | 702 |
| D-1032 | 519-539 | CCUGGUCCUGAUUUCCCUGA | 34 | AUCAGGGAAAUCAGGACCAGGUU | 703 |
| D-1033 | 558-578 | GACUCUCAGUGCAGCCUACA | 35 | AUGUAGGCUGCACUGAGAGUCUU | 704 |
| D-1034 | 560-580 | CUCUCAGUGCAGCCUACACA | 36 | UUGUGUAGGCUGCACUGAGAGUU | 705 |
| D-1035 | 561-581 | UCUCAGUGCAGCCUACACAA | 37 | UUUGUGUAGGCUGCACUGAGAUU | 706 |
| D-1036 | 562-582 | CUCAGUGCAGCCUACACAAA | 38 | AUUUGUGUAGGCUGCACUGAGUU | 707 |
| D-1037 | 563-583 | UCAGUGCAGCCUACACAAAG | 39 | ACUUUGUGUAGGCUGCACUGAUU | 708 |
| D-1038 | 596-616 | CUAUCAAAACGCCCACCACA | 40 | UUGUGGUGGGCGUUUUGAUAGUU | 709 |
| D-1039 | 597-617 | UAUCAAAACGCCCACCACAA | 41 | UUUGUGGUGGGCGUUUUGAUAUU | 710 |
| D-1040 | 598-618 | AUCAAAACGCCCACCACAAA | 42 | AUUUGUGGUGGGCGUUUUGAUUU | 711 |
| D-1041 | 599-619 | UCAAAACGCCCACCACAAAU | 43 | AAUUUGUGGUGGGCGUUUUGAUU | 712 |
| D-1042 | 602-622 | AAACGCCCACCACAAAUGCA | 44 | AUGCAUUUGUGGUGGGCGUUUUU | 713 |
| D-1043 | 603-623 | AACGCCCACCACAAAUGCAG | 45 | ACUGCAUUUGUGGUGGGCGUUUU | 714 |
| D-1044; | 684-704 | CCAGUGGAUAACCAGCUUCC | 46 | AGGAAGCUGGUUAUCCACUGGUU | 715 |
| D-2004; | | | | | |
| D-2165; | | | | | |
| D-2172 | | | | | |
| D-1045 | 685-705 | CAGUGGAUAACCAGCUUCCU | 47 | AAGGAAGCUGGUUAUCCACUGUU | 716 |
| D-1046 | 687-707 | GUGGAUAACCAGCUUCCUGA | 48 | UUCAGGAAGCUGGUUAUCCACUU | 717 |
| D-1047 | 690-710 | GAUAACCAGCUUCCUGAAGU | 49 | AACUUCAGGAAGCUGGUUAUCUU | 718 |
| D-1048 | 764-784 | AUCAAAUAGCAGACUUGUUC | 50 | AGAACAAGUCUGCUAUUUGAUUU | 719 |
| D-1049 | 766-786 | CAAAUAGCAGACUUGUUCCG | 51 | UCGGAACAAGUCUGCUAUUUGUU | 720 |
| D-1050 | 767-787 | AAAUAGCAGACUUGUUCCGA | 52 | AUCGGAACAAGUCUGCUAUUUUU | 721 |
| D-1051 | 951-971 | UGAGCUUCUUAUUGGUGACG | 53 | ACGUCACCAAUAAGAAGCUCAUU | 722 |
| D-1052 | 953-973 | AGCUUCUUAUUGGUGACGUG | 54 | ACACGUCACCAAUAAGAAGCUUU | 723 |
| D-1053 | 954-974 | GCUUCUUAUUGGUGACGUGG | 55 | UCCACGUCACCAAUAAGAAGCUU | 724 |
| D-1054; | 956-976 | UUCUUAUUGGUGACGUGGAA | 56 | AUUCCACGUCACCAAUAAGAAUU | 725 |
| D-2029 | | | | | |
| D-1055 | 962-982 | UUGGUGACGUGGAACUGAAA | 57 | UUUUCAGUUCCACGUCACCAAUU | 726 |
| D-1056 | 963-983 | UGGUGACGUGGAACUGAAAA | 58 | AUUUUCAGUUCCACGUCACCAUU | 727 |
| D-1057 | 964-984 | GGUGACGUGGAACUGAAAAG | 59 | ACUUUUCAGUUCCACGUCACCUU | 728 |
| D-1058 | 965-985 | GUGACGUGGAACUGAAAAGG | 60 | ACCUUUUCAGUUCCACGUCACUU | 729 |
| D-1059 | 991-1011 | GCUUGUUCCAGAUGCAUUUU | 61 | UAAAAUGCAUCUGGAACAAGCUU | 730 |
| D-1060 | 995-1015 | GUUCCAGAUGCAUUUUAACC | 62 | UGGUUAAAAUGCAUCUGGAACUU | 731 |
| D-1061; | 996-1016 | UUCCAGAUGCAUUUUAACCA | 63 | AUGGUUAAAAUGCAUCUGGAAUU | 732 |
| D-2002; | | | | | |
| D-2228 | | | | | |
| D-1062; | 1003-1023 | UGCAUUUUAACCACAGUGGA | 64 | AUCCACUGUGGUUAAAAUGCAUU | 733 |
| D-2003 | | | | | |
| D-1063 | 1004-1024 | GCAUUUUAACCACAGUGGAC | 65 | AGUCCACUGUGGUUAAAAUGCUU | 734 |
| D-1064 | 1033-1053 | GGUGUCAUGAGCAGGAAGGA | 66 | UUCCUUCCUGCUCAUGACACCUU | 735 |
| D-1065 | 1051-1071 | GAACCGCUGGAAACACUGAA | 67 | AUUCAGUGUUUCCAGCGGUUCUU | 736 |
| D-1066; | 1056-1076 | GCUGGAAACACUGAAGAGUU | 68 | UAACUCUUCAGUGUUUCCAGCUU | 737 |
| D-2005 | | | | | |
| D-1067; | 1059-1079 | GGAAACACUGAAGAGUUAUC | 69 | AGAUAACUCUUCAGUGUUUCCUU | 738 |
| D-2035 | | | | | |
| D-1068; | 1060-1080 | GAAACACUGAAGAGUUAUCG | 70 | ACGAUAACUCUUCAGUGUUUCUU | 739 |
| D-2006 | | | | | |
| D-1069 | 1061-1081 | AAACACUGAAGAGUUAUCGC | 71 | AGCGAUAACUCUUCAGUGUUUUU | 740 |
| D-1070; | 1062-1082 | AACACUGAAGAGUUAUCGCC | 72 | UGGCGAUAACUCUUCAGUGUUUU | 741 |
| D-2007 | | | | | |
| D-1071 | 1063-1083 | ACACUGAAGAGUUAUCGCCA | 73 | AUGGCGAUAACUCUUCAGUGUUU | 742 |
| D-1072 | 1064-1084 | CACUGAAGAGUUAUCGCCAG | 74 | ACUGGCGAUAACUCUUCAGUGUU | 743 |
| D-1073 | 1065-1085 | ACUGAAGAGUUAUCGCCAGU | 75 | AACUGGCGAUAACUCUUCAGUUU | 744 |
| D-1074; | 1066-1086 | CUGAAGAGUUAUCGCCAGUG | 76 | ACACUGGCGAUAACUCUUCAGUU | 745 |
| D-2025 | | | | | |
| D-1075 | 1067-1087 | UGAAGAGUUAUCGCCAGUGU | 77 | AACACUGGCGAUAACUCUUCAUU | 746 |
| D-1076 | 1068-1088 | GAAGAGUUAUCGCCAGUGUG | 78 | UCACACUGGCGAUAACUCUUCUU | 747 |
| D-1077 | 1071-1091 | GAGUUAUCGCCAGUGUGACC | 79 | AGGUCACACUGGCGAUAACUCUU | 748 |
| D-1078 | 1072-1092 | AGUUAUCGCCAGUGUGACCC | 80 | AGGGUCACACUGGCGAUAACUUU | 749 |
| D-1079 | 1073-1093 | GUUAUCGCCAGUGUGACCCU | 81 | AAGGGUCACACUGGCGAUAACUU | 750 |
| D-1080 | 1074-1094 | UUAUCGCCAGUGUGACCCUU | 82 | AAAGGGUCACACUGGCGAUAAUU | 751 |
| D-1081 | 1078-1098 | CGCCAGUGUGACCCUUCAGA | 83 | UUCUGAAGGGUCACACUGGCGUU | 752 |
| D-1082 | 1079-1099 | GCCAGUGUGACCCUUCAGAA | 84 | AUUCUGAAGGGUCACACUGGCUU | 753 |
| D-1083; | 1081-1101 | CAGUGUGACCCUUCAGAACG | 85 | UCGUUCUGAAGGGUCACACUGUU | 754 |
| D-2050 | | | | | |
| D-1084 | 1082-1102 | AGUGUGACCCUUCAGAACGA | 86 | UUCGUUCUGAAGGGUCACACUUU | 755 |
| D-1085 | 1083-1103 | GUGUGACCCUUCAGAACGAA | 87 | UUUCGUUCUGAAGGGUCACACUU | 756 |
| D-1086; | 1084-1104 | UGUGACCCUUCAGAACGAAA | 88 | AUUUCGUUCUGAAGGGUCACAUU | 757 |
| D-2049 | | | | | |
| D-1087; | 1085-1105 | GUGACCCUUCAGAACGAAAG | 89 | ACUUUCGUUCUGAAGGGUCACUU | 758 |
| D-2027 | | | | | |
| D-1088 | 1086-1106 | UGACCCUUCAGAACGAAAGU | 90 | AACUUUCGUUCUGAAGGGUCAUU | 759 |
| D-1089 | 1087-1107 | GACCCUUCAGAACGAAAGUU | 91 | UAACUUUCGUUCUGAAGGGUCUU | 760 |
| D-1090; | 1088-1108 | ACCCUUCAGAACGAAAGUUA | 92 | AUAACUUUCGUUCUGAAGGGUUU | 761 |
| D-2026 | | | | | |
| D-1091; | 1089-1109 | CCCUUCAGAACGAAAGUUAU | 93 | UAUAACUUUCGUUCUGAAGGGUU | 762 |
| D-2031 | | | | | |
| D-1092; | 1090-1110 | CCUUCAGAACGAAAGUUAUA | 94 | AUAUAACUUUCGUUCUGAAGGUU | 763 |
| D-2032; | | | | | |
| D-2229 | | | | | |
| D-1093; | 1091-1111 | CUUCAGAACGAAAGUUAUAU | 95 | AAUAUAACUUUCGUUCUGAAGUU | 764 |
| D-2033; | | | | | |
| D-2230 | | | | | |
| D-1094 | 1092-1112 | UUCAGAACGAAAGUUAUAUG | 96 | ACAUAUAACUUUCGUUCUGAAUU | 765 |
| D-1095; | 1093-1113 | UCAGAACGAAAGUUAUAUGG | 97 | UCCAUAUAACUUUCGUUCUGAUU | 766 |
| D-2028; | | | | | |
| D-2227 | | | | | |
| D-1096; | 1094-1114 | CAGAACGAAAGUUAUAUGGA | 98 | UUCCAUAUAACUUUCGUUCUGUU | 767 |
| D-2001; | | | | | |
| D-2163; | | | | | |
| D-2170 | | | | | |
| D-1097; | 1103-1123 | AGUUAUAUGGAAAAUCACCA | 99 | AUGGUGAUUUUCCAUAUAACUUU | 768 |
| D-2030 | | | | | |
| D-1098 | 1105-1125 | UUAUAUGGAAAAUCACCACU | 100 | AAGUGGUGAUUUUCCAUAUAAUU | 769 |
| D-1099; | 768-788 | AAUAGCAGACUUGUUCCGAC | 101 | AGUCGGAACAAGUCUGCUAUUUU | 770 |
| D-2057; | | | | | |
| D-2489; | | | | | |
| D-2501; | | | | | |
| D-2507 | | | | | |
| D-1100 | 769-789 | AUAGCAGACUUGUUCCGACC | 102 | AGGUCGGAACAAGUCUGCUAUUU | 771 |
| D-1101 | 770-790 | UAGCAGACUUGUUCCGACCC | 103 | UGGGUCGGAACAAGUCUGCUAUU | 772 |
| D-1102 | 771-791 | AGCAGACUUGUUCCGACCCA | 104 | UUGGGUCGGAACAAGUCUGCUUU | 773 |
| D-1103 | 772-792 | GCAGACUUGUUCCGACCCAA | 105 | AUUGGGUCGGAACAAGUCUGCUU | 774 |
| D-1104 | 773-793 | CAGACUUGUUCCGACCCAAG | 106 | ACUUGGGUCGGAACAAGUCUGUU | 775 |
| D-1105 | 774-794 | AGACUUGUUCCGACCCAAGG | 107 | UCCUUGGGUCGGAACAAGUCUUU | 776 |
| D-1106 | 775-795 | GACUUGUUCCGACCCAAGGA | 108 | AUCCUUGGGUCGGAACAAGUCUU | 777 |
| D-1107 | 776-796 | ACUUGUUCCGACCCAAGGAC | 109 | AGUCCUUGGGUCGGAACAAGUUU | 778 |
| D-1108 | 777-797 | CUUGUUCCGACCCAAGGACC | 110 | UGGUCCUUGGGUCGGAACAAGUU | 779 |
| D-1109 | 781-801 | UUCCGACCCAAGGACCAGAU | 111 | AAUCUGGUCCUUGGGUCGGAAUU | 780 |
| D-1110 | 790-810 | AAGGACCAGAUUGCUUACUC | 112 | UGAGUAAGCAAUCUGGUCCUUUU | 781 |
| D-1111; | 793-813 | GACCAGAUUGCUUACUCAGA | 113 | AUCUGAGUAAGCAAUCUGGUCUU | 782 |
| D-2039 | | | | | |
| D-1112 | 795-815 | CCAGAUUGCUUACUCAGACA | 114 | AUGUCUGAGUAAGCAAUCUGGUU | 783 |
| D-1113; | 796-816 | CAGAUUGCUUACUCAGACAC | 115 | AGUGUCUGAGUAAGCAAUCUGUU | 784 |
| D-2024; | | | | | |
| D-2167; | | | | | |
| D-2174 | | | | | |
| D-1114 | 797-817 | AGAUUGCUUACUCAGACACC | 116 | UGGUGUCUGAGUAAGCAAUCUUU | 785 |
| D-1115 | 798-818 | GAUUGCUUACUCAGACACCA | 117 | AUGGUGUCUGAGUAAGCAAUCUU | 786 |
| D-1116 | 799-819 | AUUGCUUACUCAGACACCAG | 118 | ACUGGUGUCUGAGUAAGCAAUUU | 787 |
| D-1117 | 802-822 | GCUUACUCAGACACCAGCCC | 119 | UGGGCUGGUGUCUGAGUAAGCUU | 788 |
| D-1118 | 804-824 | UUACUCAGACACCAGCCCAU | 120 | AAUGGGCUGGUGUCUGAGUAAUU | 789 |
| D-1119 | 851-871 | CGGAUCUCAACUCCAGGCUA | 121 | AUAGCCUGGAGUUGAGAUCCGUU | 790 |
| D-1120 | 852-872 | GGAUCUCAACUCCAGGCUAG | 122 | UCUAGCCUGGAGUUGAGAUCCUU | 791 |
| D-1121 | 853-873 | GAUCUCAACUCCAGGCUAGA | 123 | AUCUAGCCUGGAGUUGAGAUCUU | 792 |
| D-1122 | 854-874 | AUCUCAACUCCAGGCUAGAG | 124 | UCUCUAGCCUGGAGUUGAGAUUU | 793 |
| D-1123 | 859-879 | AACUCCAGGCUAGAGAAGAA | 125 | UUUCUUCUCUAGCCUGGAGUUUU | 794 |
| D-1124 | 872-892 | AGAAGAAAGUUAAAGCAACC | 126 | UGGUUGCUUUAACUUUCUUCUUU | 795 |
| D-1125 | 873-893 | GAAGAAAGUUAAAGCAACCA | 127 | UUGGUUGCUUUAACUUUCUUCUU | 796 |
| D-1126 | 874-894 | AAGAAAGUUAAAGCAACCAA | 128 | AUUGGUUGCUUUAACUUUCUUUU | 797 |
| D-1127 | 875-895 | AGAAAGUUAAAGCAACCAAC | 129 | AGUUGGUUGCUUUAACUUUCUUU | 798 |
| D-1128 | 876-896 | GAAAGUUAAAGCAACCAACU | 130 | AAGUUGGUUGCUUUAACUUUCUU | 799 |
| D-1129 | 877-897 | AAAGUUAAAGCAACCAACUU | 131 | AAAGUUGGUUGCUUUAACUUUUU | 800 |
| D-1130; | 878-898 | AAGUUAAAGCAACCAACUUC | 132 | UGAAGUUGGUUGCUUUAACUUUU | 801 |
| D-2037 | | | | | |
| D-1131 | 879-899 | AGUUAAAGCAACCAACUUCA | 133 | AUGAAGUUGGUUGCUUUAACUUU | 802 |
| D-1132 | 880-900 | GUUAAAGCAACCAACUUCAG | 134 | ACUGAAGUUGGUUGCUUUAACUU | 803 |
| D-1133 | 883-903 | AAAGCAACCAACUUCAGGCC | 135 | AGGCCUGAAGUUGGUUGCUUUUU | 804 |
| D-1134 | 885-905 | AGCAACCAACUUCAGGCCCA | 136 | UUGGGCCUGAAGUUGGUUGCUUU | 805 |
| D-1135 | 887-907 | CAACCAACUUCAGGCCCAAU | 137 | UAUUGGGCCUGAAGUUGGUUGUU | 806 |
| D-1136 | 888-908 | AACCAACUUCAGGCCCAAUA | 138 | AUAUUGGGCCUGAAGUUGGUUUU | 807 |
| D-1137 | 890-910 | CCAACUUCAGGCCCAAUAUU | 139 | AAAUAUUGGGCCUGAAGUUGGUU | 808 |
| D-1138; | 891-911 | CAACUUCAGGCCCAAUAUUG | 140 | ACAAUAUUGGGCCUGAAGUUGUU | 809 |
| D-2034; | | | | | |
| D-2231 | | | | | |
| D-1139; | 893-913 | ACUUCAGGCCCAAUAUUGUA | 141 | UUACAAUAUUGGGCCUGAAGUUU | 810 |
| D-2036; | | | | | |
| D-2232 | | | | | |
| D-1140; | 894-914 | CUUCAGGCCCAAUAUUGUAA | 142 | AUUACAAUAUUGGGCCUGAAGUU | 811 |
| D-2038; | | | | | |
| D-2161; | | | | | |
| D-2168 | | | | | |
| D-1141 | 895-915 | UUCAGGCCCAAUAUUGUAAU | 143 | AAUUACAAUAUUGGGCCUGAAUU | 812 |
| D-1142 | 896-916 | UCAGGCCCAAUAUUGUAAUU | 144 | AAAUUACAAUAUUGGGCCUGAUU | 813 |
| D-1143; | 898-918 | AGGCCCAAUAUUGUAAUUUC | 145 | UGAAAUUACAAUAUUGGGCCUUU | 814 |
| D-2000 | | | | | |
| D-1144 | 899-919 | GGCCCAAUAUUGUAAUUUCA | 146 | AUGAAAUUACAAUAUUGGGCCUU | 815 |
| D-1145 | 949-969 | GAUGAGCUUCUUAUUGGUGA | 147 | AUCACCAAUAAGAAGCUCAUCUU | 816 |
| D-1146 | 950-970 | AUGAGCUUCUUAUUGGUGAC | 148 | AGUCACCAAUAAGAAGCUCAUUU | 817 |
| D-1147; | 1107-1127 | AUAUGGAAAAUCACCACUCU | 149 | AAGAGUGGUGAUUUUCCAUAUUU | 818 |
| D-2041 | | | | | |
| D-1148 | 1108-1128 | UAUGGAAAAUCACCACUCUU | 150 | AAAGAGUGGUGAUUUUCCAUAUU | 819 |
| D-1149 | 1109-1129 | AUGGAAAAUCACCACUCUUU | 151 | AAAAGAGUGGUGAUUUUCCAUUU | 820 |
| D-1150; | 1110-1130 | UGGAAAAUCACCACUCUUUG | 152 | ACAAAGAGUGGUGAUUUUCCAUU | 821 |
| D-2060; | | | | | |
| D-2207; | | | | | |
| D-2215 | | | | | |
| D-1151 | 1144-1164 | CUGGAAAACCCAGGGACCAU | 153 | AAUGGUCCCUGGGUUUUCCAGUU | 822 |
| D-1152 | 1146-1166 | GGAAAACCCAGGGACCAUCA | 154 | UUGAUGGUCCCUGGGUUUUCCUU | 823 |
| D-1153 | 1147-1167 | GAAAACCCAGGGACCAUCAA | 155 | UUUGAUGGUCCCUGGGUUUUCUU | 824 |
| D-1154 | 1152-1172 | CCCAGGGACCAUCAAAGUGG | 156 | ACCACUUUGAUGGUCCCUGGGUU | 825 |
| D-1155 | 1153-1173 | CCAGGGACCAUCAAAGUGGG | 157 | UCCCACUUUGAUGGUCCCUGGUU | 826 |
| D-1156 | 1156-1176 | GGGACCAUCAAAGUGGGAGA | 158 | AUCUCCCACUUUGAUGGUCCCUU | 827 |
| D-1157 | 1170-1190 | GGGAGACCCUGUGUACCUGC | 159 | AGCAGGUACACAGGGUCUCCCUU | 828 |
| D-1158 | 1182-1202 | GUACCUGCUGGGCCAGUAAU | 160 | AAUUACUGGCCCAGCAGGUACUU | 829 |
| D-1159 | 1187-1207 | UGCUGGGCCAGUAAUGGGAA | 161 | AUUCCCAUUACUGGCCCAGCAUU | 830 |
| D-1160 | 1239-1259 | AAAUGUUCUCAAAAAUGACA | 162 | UUGUCAUUUUUGAGAACAUUUUU | 831 |
| D-1161 | 1240-1260 | AAUGUUCUCAAAAAUGACAA | 163 | AUUGUCAUUUUUGAGAACAUUUU | 832 |
| D-1162 | 1250-1270 | AAAAUGACAACACUUGAAGC | 164 | UGCUUCAAGUGUUGUCAUUUUUU | 833 |
| D-1163; | 1251-1271 | AAAUGACAACACUUGAAGCA | 165 | AUGCUUCAAGUGUUGUCAUUUUU | 834 |
| D-2009 | | | | | |
| D-1164 | 1252-1272 | AAUGACAACACUUGAAGCAU | 166 | AAUGCUUCAAGUGUUGUCAUUUU | 835 |
| D-1165 | 1254-1274 | UGACAACACUUGAAGCAUGG | 167 | ACCAUGCUUCAAGUGUUGUCAUU | 836 |
| D-1166; | 1255-1275 | GACAACACUUGAAGCAUGGU | 168 | AACCAUGCUUCAAGUGUUGUCUU | 837 |
| D-2058; | | | | | |
| D-2210; | | | | | |
| D-2218 | | | | | |
| D-1167 | 1256-1276 | ACAACACUUGAAGCAUGGUG | 169 | ACACCAUGCUUCAAGUGUUGUUU | 838 |
| D-1168; | 1260-1280 | CACUUGAAGCAUGGUGUUUC | 170 | UGAAACACCAUGCUUCAAGUGUU | 839 |
| D-2010 | | | | | |
| D-1169 | 1262-1282 | CUUGAAGCAUGGUGUUUCAG | 171 | UCUGAAACACCAUGCUUCAAGUU | 840 |
| D-1170; | 1343-1363 | CUGGUGUCUCAAUGCUUCAA | 172 | AUUGAAGCAUUGAGACACCAGUU | 841 |
| D-2046 | | | | | |
| D-1171; | 1344-1364 | UGGUGUCUCAAUGCUUCAAU | 173 | AAUUGAAGCAUUGAGACACCAUU | 842 |
| D-2013 | | | | | |
| D-1172; | 1345-1365 | GGUGUCUCAAUGCUUCAAUG | 174 | ACAUUGAAGCAUUGAGACACCUU | 843 |
| D-2304 | | | | | |
| D-1173; | 1346-1366 | GUGUCUCAAUGCUUCAAUGU | 175 | AACAUUGAAGCAUUGAGACACUU | 844 |
| D-2305; | | | | | |
| D-2494; | | | | | |
| D-2506; | | | | | |
| D-2512 | | | | | |
| D-1174; | 1347-1367 | UGUCUCAAUGCUUCAAUGUC | 176 | AGACAUUGAAGCAUUGAGACAUU | 845 |
| D-2047 | | | | | |
| D-1175; | 1349-1369 | UCUCAAUGCUUCAAUGUCCC | 177 | UGGGACAUUGAAGCAUUGAGAUU | 846 |
| D-2306 | | | | | |
| D-1176; | 1350-1370 | CUCAAUGCUUCAAUGUCCCA | 178 | AUGGGACAUUGAAGCAUUGAGUU | 847 |
| D-2052; | | | | | |
| D-2203; | | | | | |
| D-2211 | | | | | |
| D-1177; | 1352-1372 | CAAUGCUUCAAUGUCCCAGU | 179 | AACUGGGACAUUGAAGCAUUGUU | 848 |
| D-2042; | | | | | |
| D-2162; | | | | | |
| D-2169; | | | | | |
| D-2183; | | | | | |
| D-2184; | | | | | |
| D-2185; | | | | | |
| D-2186; | | | | | |
| D-2187; | | | | | |
| D-2291; | | | | | |
| D-2292; | | | | | |
| D-2293; | | | | | |
| D-2294; | | | | | |
| D-2295; | | | | | |
| D-2296; | | | | | |
| D-2297; | | | | | |
| D-2298; | | | | | |
| D-2299; | | | | | |
| D-2388 | | | | | |
| D-1178; | 1354-1374 | AUGCUUCAAUGUCCCAGUGC | 180 | UGCACUGGGACAUUGAAGCAUUU | 849 |
| D-2308 | | | | | |
| D-1179; | 1355-1375 | UGCUUCAAUGUCCCAGUGCA | 181 | UUGCACUGGGACAUUGAAGCAUU | 850 |
| D-2043; | | | | | |
| D-2205; | | | | | |
| D-2213 | | | | | |
| D-1180; | 1429-1449 | AAUGACAAGACAGGAUUCUG | 182 | UCAGAAUCCUGUCUUGUCAUUUU | 851 |
| D-2044 | | | | | |
| D-1181 | 1430-1450 | AUGACAAGACAGGAUUCUGA | 183 | UUCAGAAUCCUGUCUUGUCAUUU | 852 |
| D-1182; | 1432-1452 | GACAAGACAGGAUUCUGAAA | 184 | UUUUCAGAAUCCUGUCUUGUCUU | 853 |
| D-2014 | | | | | |
| D-1183 | 1435-1455 | AAGACAGGAUUCUGAAAACU | 185 | AAGUUUUCAGAAUCCUGUCUUUU | 854 |
| D-1184; | 1438-1458 | ACAGGAUUCUGAAAACUCCC | 186 | AGGGAGUUUUCAGAAUCCUGUUU | 855 |
| D-2053; | | | | | |
| D-2209; | | | | | |
| D-2217 | | | | | |
| D-1185; | 1456-1476 | CCCGUUUAACUGAUUAUGGA | 187 | UUCCAUAAUCAGUUAAACGGGUU | 856 |
| D-2008 | | | | | |
| D-1186 | 1460-1480 | UUUAACUGAUUAUGGAAUAG | 188 | ACUAUUCCAUAAUCAGUUAAAUU | 857 |
| D-1187 | 1461-1481 | UUAACUGAUUAUGGAAUAGU | 189 | AACUAUUCCAUAAUCAGUUAAUU | 858 |
| D-1188 | 1463-1483 | AACUGAUUAUGGAAUAGUUC | 190 | AGAACUAUUCCAUAAUCAGUUUU | 859 |
| D-1189; | 1464-1484 | ACUGAUUAUGGAAUAGUUCU | 191 | AAGAACUAUUCCAUAAUCAGUUU | 860 |
| D-2040 | | | | | |
| D-1190; | 1465-1485 | CUGAUUAUGGAAUAGUUCUU | 192 | AAAGAACUAUUCCAUAAUCAGUU | 861 |
| D-2062 | | | | | |
| D-1191; | 1467-1487 | GAUUAUGGAAUAGUUCUUUC | 193 | AGAAAGAACUAUUCCAUAAUCUU | 862 |
| D-2011 | | | | | |
| D-1192; | 1468-1488 | AUUAUGGAAUAGUUCUUUCU | 194 | AAGAAAGAACUAUUCCAUAAUUU | 863 |
| D-2012 | | | | | |
| D-1193 | 1522-1542 | UUGCAUCCUGUCACUACCAC | 195 | AGUGGUAGUGACAGGAUGCAAUU | 864 |
| D-1194; | 1650-1670 | CACCCCAAAUAUGGCUGGAA | 196 | AUUCCAGCCAUAUUUGGGGUGUU | 865 |
| D-2051 | | | | | |
| D-1195 | 1652-1672 | CCCCAAAUAUGGCUGGAAUG | 197 | ACAUUCCAGCCAUAUUUGGGGUU | 866 |
| D-1196 | 1688-1708 | CUCAAGCCCCGGGCUAGCUU | 198 | AAAGCUAGCCCGGGGCUUGAGUU | 867 |
| D-1197 | 1689-1709 | UCAAGCCCCGGGCUAGCUUU | 199 | AAAAGCUAGCCCGGGGCUUGAUU | 868 |
| D-1198 | 1691-1711 | AAGCCCCGGGCUAGCUUUUG | 200 | UCAAAAGCUAGCCCGGGGCUUUU | 869 |
| D-1199 | 1692-1712 | AGCCCCGGGCUAGCUUUUGA | 201 | UUCAAAAGCUAGCCCGGGGCUUU | 870 |
| D-1200 | 1693-1713 | GCCCCGGGCUAGCUUUUGAA | 202 | UUUCAAAAGCUAGCCCGGGGCUU | 871 |
| D-1201 | 1695-1715 | CCCGGGCUAGCUUUUGAAAU | 203 | AAUUUCAAAAGCUAGCCCGGGUU | 872 |
| D-1202 | 1699-1719 | GGCUAGCUUUUGAAAUGGCA | 204 | AUGCCAUUUCAAAAGCUAGCCUU | 873 |
| D-1203 | 1718-1738 | AUAAAGACUGAGGUGACCUU | 205 | AAAGGUCACCUCAGUCUUUAUUU | 874 |
| D-1204; | 1747-1767 | CUGCAGAUAUUAAUUUUCCA | 206 | AUGGAAAAUUAAUAUCUGCAGUU | 875 |
| D-2055 | | | | | |
| D-1205 | 1752-1772 | GAUAUUAAUUUUCCAUAGAU | 207 | AAUCUAUGGAAAAUUAAUAUCUU | 876 |
| D-1206 | 1753-1773 | AUAUUAAUUUUCCAUAGAUC | 208 | AGAUCUAUGGAAAAUUAAUAUUU | 877 |
| D-1207 | 1757-1777 | UAAUUUUCCAUAGAUCUGGA | 209 | AUCCAGAUCUAUGGAAAAUUAUU | 878 |
| D-1208 | 1758-1778 | AAUUUUCCAUAGAUCUGGAU | 210 | AAUCCAGAUCUAUGGAAAAUUUU | 879 |
| D-1209 | 1759-1779 | AUUUUCCAUAGAUCUGGAUC | 211 | AGAUCCAGAUCUAUGGAAAAUUU | 880 |
| D-1210 | 1761-1781 | UUUCCAUAGAUCUGGAUCUG | 212 | ACAGAUCCAGAUCUAUGGAAAUU | 881 |
| D-1211 | 1788-1808 | UGCUUCUCAGACAGCAUUGG | 213 | UCCAAUGCUGUCUGAGAAGCAUU | 882 |
| D-1212 | 1789-1809 | GCUUCUCAGACAGCAUUGGA | 214 | AUCCAAUGCUGUCUGAGAAGCUU | 883 |
| D-1213; | 1794-1814 | UCAGACAGCAUUGGAUUUCC | 215 | AGGAAAUCCAAUGCUGUCUGAUU | 884 |
| D-2059; | | | | | |
| D-2206; | | | | | |
| D-2214 | | | | | |
| D-1214 | 1795-1815 | CAGACAGCAUUGGAUUUCCU | 216 | UAGGAAAUCCAAUGCUGUCUGUU | 885 |
| D-1215; | 1796-1816 | AGACAGCAUUGGAUUUCCUA | 217 | UUAGGAAAUCCAAUGCUGUCUUU | 886 |
| D-2061; | | | | | |
| D-2208; | | | | | |
| D-2216; | | | | | |
| D-2267 | | | | | |
| D-1216 | 1810-1830 | UUCCUAAAGGUGCUCAGGAG | 218 | ACUCCUGAGCACCUUUAGGAAUU | 887 |
| D-1217 | 1849-1869 | AGGACCCCUGGAUCCUUGCC | 219 | UGGCAAGGAUCCAGGGGUCCUUU | 888 |
| D-1218 | 1854-1874 | CCCUGGAUCCUUGCCAUUCC | 220 | AGGAAUGGCAAGGAUCCAGGGUU | 889 |
| D-1219 | 1856-1876 | CUGGAUCCUUGCCAUUCCCC | 221 | AGGGGAAUGGCAAGGAUCCAGUU | 890 |
| D-1220; | 1858-1878 | GGAUCCUUGCCAUUCCCCUC | 222 | UGAGGGGAAUGGCAAGGAUCCUU | 891 |
| D-2054 | | | | | |
| D-1221 | 1859-1879 | GAUCCUUGCCAUUCCCCUCA | 223 | AUGAGGGGAAUGGCAAGGAUCUU | 892 |
| D-1222 | 1862-1882 | CCUUGCCAUUCCCCUCAGCU | 224 | UAGCUGAGGGGAAUGGCAAGGUU | 893 |
| D-1223 | 1863-1883 | CUUGCCAUUCCCCUCAGCUA | 225 | UUAGCUGAGGGGAAUGGCAAGUU | 894 |
| D-1224 | 1866-1886 | GCCAUUCCCCUCAGCUAAUG | 226 | UCAUUAGCUGAGGGGAAUGGCUU | 895 |
| D-1225 | 1868-1888 | CAUUCCCCUCAGCUAAUGAC | 227 | AGUCAUUAGCUGAGGGGAAUGUU | 896 |
| D-1226 | 1886-1906 | ACGGAGUGCUCCUUCUCCAG | 228 | ACUGGAGAAGGAGCACUCCGUUU | 897 |
| D-1227 | 1976-1996 | GAAAACCUUUAAAGGGGGAA | 229 | UUUCCCCCUUUAAAGGUUUUCUU | 898 |
| D-1228; | 2004-2024 | CAUAUGUCAGUUGUUUAAAA | 230 | AUUUUAAACAACUGACAUAUGUU | 899 |
| D-2015 | | | | | |
| D-1229 | 2010-2030 | UCAGUUGUUUAAAACCCAAU | 231 | UAUUGGGUUUUAAACAACUGAUU | 900 |
| D-1230; | 2012-2032 | AGUUGUUUAAAACCCAAUAU | 232 | AAUAUUGGGUUUUAAACAACUUU | 901 |
| D-2016 | | | | | |
| D-1231 | 41-61 | AAGGACGCACUGCUCUGAUU | 233 | AAAUCAGAGCAGUGCGUCCUUUU | 902 |
| D-1232 | 1690-1710 | CAAGCCCCGGGCUAGCUUUU | 234 | AAAAAGCUAGCCCGGGGCUUGUU | 903 |
| D-1233 | 1694-1714 | CCCCGGGCUAGCUUUUGAAA | 235 | AUUUCAAAAGCUAGCCCGGGGUU | 904 |
| D-1234 | 1723-1743 | GACUGAGGUGACCUUCAGGA | 236 | UUCCUGAAGGUCACCUCAGUCUU | 905 |
| D-1235 | 1754-1774 | UAUUAAUUUUCCAUAGAUCU | 237 | AAGAUCUAUGGAAAAUUAAUAUU | 906 |
| D-1236; | 1760-1780 | UUUUCCAUAGAUCUGGAUCU | 238 | AAGAUCCAGAUCUAUGGAAAAUU | 907 |
| D-2048 | | | | | |
| D-1237 | 1791-1811 | UUCUCAGACAGCAUUGGAUU | 239 | AAAUCCAAUGCUGUCUGAGAAUU | 908 |
| D-1238 | 1809-1829 | UUUCCUAAAGGUGCUCAGGA | 240 | AUCCUGAGCACCUUUAGGAAAUU | 909 |
| D-1239 | 1855-1875 | CCUGGAUCCUUGCCAUUCCC | 241 | AGGGAAUGGCAAGGAUCCAGGUU | 910 |
| D-1240 | 1861-1881 | UCCUUGCCAUUCCCCUCAGC | 242 | AGCUGAGGGGAAUGGCAAGGAUU | 911 |
| D-1241 | 1867-1887 | CCAUUCCCCUCAGCUAAUGA | 243 | AUCAUUAGCUGAGGGGAAUGGUU | 912 |
| D-1242 | 1977-1997 | AAAACCUUUAAAGGGGGAAA | 244 | UUUUCCCCCUUUAAAGGUUUUUU | 913 |
| D-1243; | 2014-2034 | UUGUUUAAAACCCAAUAUCU | 245 | UAGAUAUUGGGUUUUAAACAAUU | 914 |
| D-2017; | | | | | |
| D-2204; | | | | | |
| D-2212 | | | | | |
| D-1244 | 2055-2075 | CUCUAAGAUCUGAUGAAGUA | 246 | AUACUUCAUCAGAUCUUAGAGUU | 915 |
| D-1245; | 2057-2077 | CUAAGAUCUGAUGAAGUAUA | 247 | AUAUACUUCAUCAGAUCUUAGUU | 916 |
| D-2045; | | | | | |
| D-2166; | | | | | |
| D-2173 | | | | | |
| D-1246; | 2058-2078 | UAAGAUCUGAUGAAGUAUAU | 248 | AAUAUACUUCAUCAGAUCUUAUU | 917 |
| D-2303 | | | | | |
| D-1247; | 2059-2079 | AAGAUCUGAUGAAGUAUAUU | 249 | AAAUAUACUUCAUCAGAUCUUUU | 918 |
| D-2056 | | | | | |
| D-1248; | 2066-2086 | GAUGAAGUAUAUUUUUUAUU | 250 | AAAUAAAAAAUAUACUUCAUCUU | 919 |
| D-2018 | | | | | |
| D-1249; | 2079-2099 | UUUUAUUGCCAUUUUGUCCU | 251 | AAGGACAAAAUGGCAAUAAAAUU | 920 |
| D-2019 | | | | | |
| D-1250 | 2080-2100 | UUUAUUGCCAUUUUGUCCUU | 252 | AAAGGACAAAAUGGCAAUAAAUU | 921 |
| D-1251 | 2081-2101 | UUAUUGCCAUUUUGUCCUUU | 253 | AAAAGGACAAAAUGGCAAUAAUU | 922 |
| D-1252; | 2083-2103 | AUUGCCAUUUUGUCCUUUGA | 254 | AUCAAAGGACAAAAUGGCAAUUU | 923 |
| D-2020 | | | | | |
| D-1253; | 2105-2125 | AUAUUGGGAAGUUGACUAAA | 255 | AUUUAGUCAACUUCCCAAUAUUU | 924 |
| D-2021 | | | | | |
| D-1254 | 2109-2129 | UGGGAAGUUGACUAAACUUG | 256 | UCAAGUUUAGUCAACUUCCCAUU | 925 |
| D-1255 | 2110-2130 | GGGAAGUUGACUAAACUUGA | 257 | UUCAAGUUUAGUCAACUUCCCUU | 926 |
| D-1256; | 2111-2131 | GGAAGUUGACUAAACUUGAA | 258 | UUUCAAGUUUAGUCAACUUCCUU | 927 |
| D-2022; | | | | | |
| D-2164; | | | | | |
| D-2171 | | | | | |
| D-1257; | 2144-2164 | ACUGUGAAUAAAUGGAAGCU | 259 | UAGCUUCCAUUUAUUCACAGUUU | 928 |
| D-2023 | | | | | |
| D-1258 | 2148-2168 | UGAAUAAAUGGAAGCUACUU | 260 | AAAGUAGCUUCCAUUUAUUCAUU | 929 |
| D-1259 | 2152-2172 | UAAAUGGAAGCUACUUUGAC | 261 | AGUCAAAGUAGCUUCCAUUUAUU | 930 |
| D-1260 | 2153-2173 | AAAUGGAAGCUACUUUGACU | 262 | UAGUCAAAGUAGCUUCCAUUUUU | 931 |
| D-1261 | 2159-2179 | AAGCUACUUUGACUAGUUUC | 263 | UGAAACUAGUCAAAGUAGCUUUU | 932 |
| D-1262 | 2160-2180 | AGCUACUUUGACUAGUUUCA | 264 | AUGAAACUAGUCAAAGUAGCUUU | 933 |
| D-1263 | 1888-1908 | GGAGUGCUCCUUCUCCAGUU | 265 | AAACUGGAGAAGGAGCACUCCUU | 934 |
| D-1264 | 1979-1999 | AACCUUUAAAGGGGGAAAAG | 266 | ACUUUUCCCCCUUUAAAGGUUUU | 935 |
| D-1265 | 1980-2000 | ACCUUUAAAGGGGGAAAAGG | 267 | UCCUUUUCCCCCUUUAAAGGUUU | 936 |
| D-1266; | 2082-2102 | UAUUGCCAUUUUGUCCUUUG | 268 | UCAAAGGACAAAAUGGCAAUAUU | 937 |
| D-2145; | | | | | |
| D-2492; | | | | | |
| D-2504; | | | | | |
| D-2510 | | | | | |
| D-1267 | 2112-2132 | GAAGUUGACUAAACUUGAAA | 269 | UAUUCAAGUUUAGUCAACUUCUU | 938 |
| D-1268 | 2113-2133 | AAGUUGACUAAACUUGAAAA | 270 | UAUUUCAAGUUUAGUCAACUUUU | 939 |
| D-1269 | 2161-2181 | GCUACUUUGACUAGUUUCAG | 271 | UCUGAAACUAGUCAAAGUAGCUU | 940 |
| D-1270 | 557-577 | UGACUCUCAGUGCAGCCUAC | 272 | UGUAGGCUGCACUGAGAGUCAUU | 941 |
| D-1271 | 604-624 | ACGCCCACCACAAAUGCAGU | 273 | AACUGCAUUUGUGGUGGGCGUUU | 942 |
| D-1272 | 683-703 | CCCAGUGGAUAACCAGCUUC | 274 | AGAAGCUGGUUAUCCACUGGGUU | 943 |
| D-1273 | 763-783 | CAUCAAAUAGCAGACUUGUU | 275 | AAACAAGUCUGCUAUUUGAUGUU | 944 |
| D-1274 | 765-785 | UCAAAUAGCAGACUUGUUCC | 276 | AGGAACAAGUCUGCUAUUUGAUU | 945 |
| D-1275 | 864-884 | CAGGCUAGAGAAGAAAGUUA | 277 | UUAACUUUCUUCUCUAGCCUGUU | 946 |
| D-1276; | 865-885 | AGGCUAGAGAAGAAAGUUAA | 278 | UUUAACUUUCUUCUCUAGCCUUU | 947 |
| D-2064 | | | | | |
| D-1277 | 889-909 | ACCAACUUCAGGCCCAAUAU | 279 | AAUAUUGGGCCUGAAGUUGGUUU | 948 |
| D-1278 | 952-972 | GAGCUUCUUAUUGGUGACGU | 280 | AACGUCACCAAUAAGAAGCUCUU | 949 |
| D-1279 | 955-975 | CUUCUUAUUGGUGACGUGGA | 281 | UUCCACGUCACCAAUAAGAAGUU | 950 |
| D-1280 | 957-977 | UCUUAUUGGUGACGUGGAAC | 282 | AGUUCCACGUCACCAAUAAGAUU | 951 |
| D-1281 | 961-981 | AUUGGUGACGUGGAACUGAA | 283 | UUUCAGUUCCACGUCACCAAUUU | 952 |
| D-1282; | 992-1012 | CUUGUUCCAGAUGCAUUUUA | 284 | UUAAAAUGCAUCUGGAACAAGUU | 953 |
| D-2144 | | | | | |
| D-1283 | 994-1014 | UGUUCCAGAUGCAUUUUAAC | 285 | AGUUAAAAUGCAUCUGGAACAUU | 954 |
| D-1284; | 1057-1077 | CUGGAAACACUGAAGAGUUA | 286 | AUAACUCUUCAGUGUUUCCAGUU | 955 |
| D-2074 | | | | | |
| D-1285; | 1058-1078 | UGGAAACACUGAAGAGUUAU | 287 | AAUAACUCUUCAGUGUUUCCAUU | 956 |
| D-2125 | | | | | |
| D-1286; | 1069-1089 | AAGAGUUAUCGCCAGUGUGA | 288 | AUCACACUGGCGAUAACUCUUUU | 957 |
| D-2138 | | | | | |
| D-1287 | 1070-1090 | AGAGUUAUCGCCAGUGUGAC | 289 | AGUCACACUGGCGAUAACUCUUU | 958 |
| D-1288; | 1104-1124 | GUUAUAUGGAAAAUCACCAC | 290 | AGUGGUGAUUUUCCAUAUAACUU | 959 |
| D-2140 | | | | | |
| D-1289 | 1141-1161 | GUGCUGGAAAACCCAGGGAC | 291 | AGUCCCUGGGUUUUCCAGCACUU | 960 |
| D-1290 | 1142-1162 | UGCUGGAAAACCCAGGGACC | 292 | UGGUCCCUGGGUUUUCCAGCAUU | 961 |
| D-1291 | 1143-1163 | GCUGGAAAACCCAGGGACCA | 293 | AUGGUCCCUGGGUUUUCCAGCUU | 962 |
| D-1292 | 1148-1168 | AAAACCCAGGGACCAUCAAA | 294 | AUUUGAUGGUCCCUGGGUUUUUU | 963 |
| D-1293 | 1149-1169 | AAACCCAGGGACCAUCAAAG | 295 | ACUUUGAUGGUCCCUGGGUUUUU | 964 |
| D-1294 | 1150-1170 | AACCCAGGGACCAUCAAAGU | 296 | AACUUUGAUGGUCCCUGGGUUUU | 965 |
| D-1295 | 1151-1171 | ACCCAGGGACCAUCAAAGUG | 297 | ACACUUUGAUGGUCCCUGGGUUU | 966 |
| D-1296 | 1168-1188 | GUGGGAGACCCUGUGUACCU | 298 | AAGGUACACAGGGUCUCCCACUU | 967 |
| D-1297 | 1188-1208 | GCUGGGCCAGUAAUGGGAAC | 299 | AGUUCCCAUUACUGGCCCAGCUU | 968 |
| D-1298; | 1248-1268 | CAAAAAUGACAACACUUGAA | 300 | AUUCAAGUGUUGUCAUUUUUGUU | 969 |
| D-2067 | | | | | |
| D-1299; | 1253-1273 | AUGACAACACUUGAAGCAUG | 301 | ACAUGCUUCAAGUGUUGUCAUUU | 970 |
| D-2119; | | | | | |
| D-2491; | | | | | |
| D-2503; | | | | | |
| D-2509 | | | | | |
| D-1300 | 1261-1281 | ACUUGAAGCAUGGUGUUUCA | 302 | AUGAAACACCAUGCUUCAAGUUU | 971 |
| D-1301 | 1306-1326 | AAAUUUGUGAUUUUCACAUU | 303 | AAAUGUGAAAAUCACAAAUUUUU | 972 |
| D-1302; | 1353-1373 | AAUGCUUCAAUGUCCCAGUG | 304 | ACACUGGGACAUUGAAGCAUUUU | 973 |
| D-2307 | | | | | |
| D-1303 | 1428-1448 | AAAUGACAAGACAGGAUUCU | 305 | AAGAAUCCUGUCUUGUCAUUUUU | 974 |
| D-1304; | 1469-1489 | UUAUGGAAUAGUUCUUUCUC | 306 | AGAGAAAGAACUAUUCCAUAAUU | 975 |
| D-2149 | | | | | |
| D-1305 | 1470-1490 | UAUGGAAUAGUUCUUUCUCC | 307 | AGGAGAAAGAACUAUUCCAUAUU | 976 |
| D-1306 | 1474-1494 | GAAUAGUUCUUUCUCCUGCU | 308 | AAGCAGGAGAAAGAACUAUUCUU | 977 |
| D-1307 | 1475-1495 | AAUAGUUCUUUCUCCUGCUU | 309 | AAAGCAGGAGAAAGAACUAUUUU | 978 |
| D-1308 | 1523-1543 | UGCAUCCUGUCACUACCACU | 310 | AAGUGGUAGUGACAGGAUGCAUU | 979 |
| D-1309 | 1524-1544 | GCAUCCUGUCACUACCACUC | 311 | AGAGUGGUAGUGACAGGAUGCUU | 980 |
| D-1310; | 1696-1716 | CCGGGCUAGCUUUUGAAAUG | 312 | ACAUUUCAAAAGCUAGCCCGGUU | 981 |
| D-2139 | | | | | |
| D-1311; | 1697-1717 | CGGGCUAGCUUUUGAAAUGG | 313 | ACCAUUUCAAAAGCUAGCCCGUU | 982 |
| D-2073 | | | | | |
| D-1312 | 1721-1741 | AAGACUGAGGUGACCUUCAG | 314 | ACUGAAGGUCACCUCAGUCUUUU | 983 |
| D-1313 | 1728-1748 | AGGUGACCUUCAGGAAGCAC | 315 | AGUGCUUCCUGAAGGUCACCUUU | 984 |
| D-1314 | 1764-1784 | CCAUAGAUCUGGAUCUGGCC | 316 | AGGCCAGAUCCAGAUCUAUGGUU | 985 |
| D-1315; | 1805-1825 | UGGAUUUCCUAAAGGUGCUC | 317 | UGAGCACCUUUAGGAAAUCCAUU | 986 |
| D-2130 | | | | | |
| D-1316 | 1807-1827 | GAUUUCCUAAAGGUGCUCAG | 318 | ACUGAGCACCUUUAGGAAAUCUU | 987 |
| D-1317 | 1811-1831 | UCCUAAAGGUGCUCAGGAGG | 319 | UCCUCCUGAGCACCUUUAGGAUU | 988 |
| D-1318 | 1846-1866 | UGGAGGACCCCUGGAUCCUU | 320 | AAAGGAUCCAGGGGUCCUCCAUU | 989 |
| D-1319 | 1847-1867 | GGAGGACCCCUGGAUCCUUG | 321 | ACAAGGAUCCAGGGGUCCUCCUU | 990 |
| D-1320 | 1848-1868 | GAGGACCCCUGGAUCCUUGC | 322 | AGCAAGGAUCCAGGGGUCCUCUU | 991 |
| D-1321 | 1887-1907 | CGGAGUGCUCCUUCUCCAGU | 323 | AACUGGAGAAGGAGCACUCCGUU | 992 |
| D-1322 | 39-59 | AGAAGGACGCACUGCUCUGA | 324 | AUCAGAGCAGUGCGUCCUUCUUU | 993 |
| D-1323 | 53-73 | CUCUGAUUGGCCCGGAAGGG | 325 | ACCCUUCCGGGCCAAUCAGAGUU | 994 |
| D-1324 | 54-74 | UCUGAUUGGCCCGGAAGGGU | 326 | AACCCUUCCGGGCCAAUCAGAUU | 995 |
| D-1325 | 55-75 | CUGAUUGGCCCGGAAGGGUU | 327 | AAACCCUUCCGGGCCAAUCAGUU | 996 |
| D-1326 | 102-122 | GGCCAAAGGCCGCACCUUCC | 328 | AGGAAGGUGCGGCCUUUGGCCUU | 997 |
| D-1327 | 168-188 | CCUCGCGGAGAAGCCAGCCA | 329 | AUGGCUGGCUUCUCCGCGAGGUU | 998 |
| D-1328 | 174-194 | GGAGAAGCCAGCCAUGGGCG | 330 | ACGCCCAUGGCUGGCUUCUCCUU | 999 |
| D-1329 | 175-195 | GAGAAGCCAGCCAUGGGCGC | 331 | AGCGCCCAUGGCUGGCUUCUCUU | 1000 |
| D-1330 | 474-494 | GAUCAACCAGGAGGGAAACA | 332 | AUGUUUCCCUCCUGGUUGAUCUU | 1001 |
| D-1331 | 499-519 | ACUGCUCGCCAGGAACCUCG | 333 | ACGAGGUUCCUGGCGAGCAGUUU | 1002 |
| D-1332 | 504-524 | UCGCCAGGAACCUCGCCUGG | 334 | ACCAGGCGAGGUUCCUGGCGAUU | 1003 |
| D-1333 | 506-526 | GCCAGGAACCUCGCCUGGUC | 335 | AGACCAGGCGAGGUUCCUGGCUU | 1004 |
| D-1334 | 511-531 | GAACCUCGCCUGGUCCUGAU | 336 | AAUCAGGACCAGGCGAGGUUCUU | 1005 |
| D-1335 | 545-565 | AUGGUGACACCCUGACUCUC | 337 | UGAGAGUCAGGGUGUCACCAUUU | 1006 |
| D-1336 | 546-566 | UGGUGACACCCUGACUCUCA | 338 | AUGAGAGUCAGGGUGUCACCAUU | 1007 |
| D-1337 | 550-570 | GACACCCUGACUCUCAGUGC | 339 | UGCACUGAGAGUCAGGGUGUCUU | 1008 |
| D-1338; | 553-573 | ACCCUGACUCUCAGUGCAGC | 340 | AGCUGCACUGAGAGUCAGGGUUU | 1009 |
| D-2085 | | | | | |
| D-1339 | 680-700 | CCGCCCAGUGGAUAACCAGC | 341 | AGCUGGUUAUCCACUGGGCGGUU | 1010 |
| D-1340 | 720-740 | CCGCCUGGUGCACUUCGAGC | 342 | AGCUCGAAGUGCACCAGGCGGUU | 1011 |
| D-1341 | 721-741 | CGCCUGGUGCACUUCGAGCC | 343 | AGGCUCGAAGUGCACCAGGCGUU | 1012 |
| D-1342 | 722-742 | GCCUGGUGCACUUCGAGCCU | 344 | AAGGCUCGAAGUGCACCAGGCUU | 1013 |
| D-1343 | 723-743 | CCUGGUGCACUUCGAGCCUC | 345 | UGAGGCUCGAAGUGCACCAGGUU | 1014 |
| D-1344 | 724-744 | CUGGUGCACUUCGAGCCUCA | 346 | AUGAGGCUCGAAGUGCACCAGUU | 1015 |
| D-1345 | 725-745 | UGGUGCACUUCGAGCCUCAC | 347 | UGUGAGGCUCGAAGUGCACCAUU | 1016 |
| D-1346 | 726-746 | GGUGCACUUCGAGCCUCACA | 348 | AUGUGAGGCUCGAAGUGCACCUU | 1017 |
| D-1347 | 727-747 | GUGCACUUCGAGCCUCACAU | 349 | AAUGUGAGGCUCGAAGUGCACUU | 1018 |
| D-1348 | 728-748 | UGCACUUCGAGCCUCACAUG | 350 | ACAUGUGAGGCUCGAAGUGCAUU | 1019 |
| D-1349 | 729-749 | GCACUUCGAGCCUCACAUGC | 351 | AGCAUGUGAGGCUCGAAGUGCUU | 1020 |
| D-1350 | 730-750 | CACUUCGAGCCUCACAUGCG | 352 | UCGCAUGUGAGGCUCGAAGUGUU | 1021 |
| D-1351 | 731-751 | ACUUCGAGCCUCACAUGCGA | 353 | AUCGCAUGUGAGGCUCGAAGUUU | 1022 |
| D-1352 | 732-752 | CUUCGAGCCUCACAUGCGAC | 354 | AGUCGCAUGUGAGGCUCGAAGUU | 1023 |
| D-1353 | 733-753 | UUCGAGCCUCACAUGCGACC | 355 | AGGUCGCAUGUGAGGCUCGAAUU | 1024 |
| D-1354 | 734-754 | UCGAGCCUCACAUGCGACCG | 356 | UCGGUCGCAUGUGAGGCUCGAUU | 1025 |
| D-1355 | 735-755 | CGAGCCUCACAUGCGACCGA | 357 | AUCGGUCGCAUGUGAGGCUCGUU | 1026 |
| D-1356 | 738-758 | GCCUCACAUGCGACCGAGAC | 358 | AGUCUCGGUCGCAUGUGAGGCUU | 1027 |
| D-1357 | 825-845 | CUUGAUCCUUUCUGAGGCGU | 359 | AACGCCUCAGAAAGGAUCAAGUU | 1028 |
| D-1358 | 847-867 | CUGGCGGAUCUCAACUCCAG | 360 | ACUGGAGUUGAGAUCCGCCAGUU | 1029 |
| D-1359 | 848-868 | UGGCGGAUCUCAACUCCAGG | 361 | ACCUGGAGUUGAGAUCCGCCAUU | 1030 |
| D-1360 | 923-943 | GCGAUGUCUAUGCAGAGGAU | 362 | AAUCCUCUGCAUAGACAUCGCUU | 1031 |
| D-1361 | 925-945 | GAUGUCUAUGCAGAGGAUUC | 363 | AGAAUCCUCUGCAUAGACAUCUU | 1032 |
| D-1362 | 927-947 | UGUCUAUGCAGAGGAUUCUU | 364 | AAAGAAUCCUCUGCAUAGACAUU | 1033 |
| D-1363; | 928-948 | GUCUAUGCAGAGGAUUCUUG | 365 | ACAAGAAUCCUCUGCAUAGACUU | 1034 |
| D-2084 | | | | | |
| D-1364 | 929-949 | UCUAUGCAGAGGAUUCUUGG | 366 | ACCAAGAAUCCUCUGCAUAGAUU | 1035 |
| D-1365 | 930-950 | CUAUGCAGAGGAUUCUUGGG | 367 | UCCCAAGAAUCCUCUGCAUAGUU | 1036 |
| D-1366 | 984-1004 | GGUGAUGGCUUGUUCCAGAU | 368 | AAUCUGGAACAAGCCAUCACCUU | 1037 |
| D-1367; | 985-1005 | GUGAUGGCUUGUUCCAGAUG | 369 | ACAUCUGGAACAAGCCAUCACUU | 1038 |
| D-2083; | | | | | |
| D-2244; | | | | | |
| D-2249 | | | | | |
| D-1368 | 989-1009 | UGGCUUGUUCCAGAUGCAUU | 370 | AAAUGCAUCUGGAACAAGCCAUU | 1039 |
| D-1369 | 1005-1025 | CAUUUUAACCACAGUGGACC | 371 | AGGUCCACUGUGGUUAAAAUGUU | 1040 |
| D-1370 | 1007-1027 | UUUUAACCACAGUGGACCCA | 372 | AUGGGUCCACUGUGGUUAAAAUU | 1041 |
| D-1371 | 1008-1028 | UUUAACCACAGUGGACCCAG | 373 | UCUGGGUCCACUGUGGUUAAAUU | 1042 |
| D-1372 | 1118-1138 | CACCACUCUUUGGGCAGUAU | 374 | AAUACUGCCCAAAGAGUGGUGUU | 1043 |
| D-1373 | 1119-1139 | ACCACUCUUUGGGCAGUAUU | 375 | AAAUACUGCCCAAAGAGUGGUUU | 1044 |
| D-1374 | 1125-1145 | CUUUGGGCAGUAUUUUGUGC | 376 | AGCACAAAAUACUGCCCAAAGUU | 1045 |
| D-1375; | 1126-1146 | UUUGGGCAGUAUUUUGUGCU | 377 | AAGCACAAAAUACUGCCCAAAUU | 1046 |
| D-2071 | | | | | |
| D-1376 | 1127-1147 | UUGGGCAGUAUUUUGUGCUG | 378 | ACAGCACAAAAUACUGCCCAAUU | 1047 |
| D-1377 | 1128-1148 | UGGGCAGUAUUUUGUGCUGG | 379 | UCCAGCACAAAAUACUGCCCAUU | 1048 |
| D-1378 | 1130-1150 | GGCAGUAUUUUGUGCUGGAA | 380 | UUUCCAGCACAAAAUACUGCCUU | 1049 |
| D-1379 | 1135-1155 | UAUUUUGUGCUGGAAAACCC | 381 | UGGGUUUUCCAGCACAAAAUAUU | 1050 |
| D-1380 | 1136-1156 | AUUUUGUGCUGGAAAACCCA | 382 | AUGGGUUUUCCAGCACAAAAUUU | 1051 |
| D-1381; | 1206-1226 | ACCGUAUGUCCUGGAAUAUU | 383 | UAAUAUUCCAGGACAUACGGUUU | 1052 |
| D-2154 | | | | | |
| D-1382; | 1207-1227 | CCGUAUGUCCUGGAAUAUUA | 384 | AUAAUAUUCCAGGACAUACGGUU | 1053 |
| D-2066 | | | | | |
| D-1383; | 1209-1229 | GUAUGUCCUGGAAUAUUAGA | 385 | AUCUAAUAUUCCAGGACAUACUU | 1054 |
| D-2063 | | | | | |
| D-1384; | 1210-1230 | UAUGUCCUGGAAUAUUAGAU | 386 | AAUCUAAUAUUCCAGGACAUAUU | 1055 |
| D-2142 | | | | | |
| D-1385; | 1211-1231 | AUGUCCUGGAAUAUUAGAUG | 387 | ACAUCUAAUAUUCCAGGACAUUU | 1056 |
| D-2301; | | | | | |
| D-2441; | | | | | |
| D-2445 | | | | | |
| D-1386; | 1212-1232 | UGUCCUGGAAUAUUAGAUGC | 388 | AGCAUCUAAUAUUCCAGGACAUU | 1057 |
| D-2081; | | | | | |
| D-2245; | | | | | |
| D-2250; | | | | | |
| D-2312; | | | | | |
| D-2317; | | | | | |
| D-2322; | | | | | |
| D-2327; | | | | | |
| D-2332; | | | | | |
| D-2337; | | | | | |
| D-2342; | | | | | |
| D-2347; | | | | | |
| D-2352; | | | | | |
| D-2357; | | | | | |
| D-2396 | | | | | |
| D-1387; | 1213-1233 | GUCCUGGAAUAUUAGAUGCC | 389 | AGGCAUCUAAUAUUCCAGGACUU | 1058 |
| D-2080; | | | | | |
| D-2246; | | | | | |
| D-2251; | | | | | |
| D-2264; | | | | | |
| D-2276; | | | | | |
| D-2277; | | | | | |
| D-2278; | | | | | |
| D-2279; | | | | | |
| D-2280; | | | | | |
| D-2281; | | | | | |
| D-2282; | | | | | |
| D-2283; | | | | | |
| D-2284; | | | | | |
| D-2285; | | | | | |
| D-2286; | | | | | |
| D-2287; | | | | | |
| D-2288; | | | | | |
| D-2289; | | | | | |
| D-2311; | | | | | |
| D-2316; | | | | | |
| D-2321; | | | | | |
| D-2326; | | | | | |
| D-2331; | | | | | |
| D-2336; | | | | | |
| D-2341; | | | | | |
| D-2346; | | | | | |
| D-2351; | | | | | |
| D-2356; | | | | | |
| D-2395 | | | | | |
| D-1388; | 1214-1234 | UCCUGGAAUAUUAGAUGCCU | 390 | AAGGCAUCUAAUAUUCCAGGAUU | 1059 |
| D-2078; | | | | | |
| D-2248; | | | | | |
| D-2253; | | | | | |
| D-2265; | | | | | |
| D-2309; | | | | | |
| D-2314; | | | | | |
| D-2319; | | | | | |
| D-2324; | | | | | |
| D-2329; | | | | | |
| D-2334; | | | | | |
| D-2339; | | | | | |
| D-2344; | | | | | |
| D-2349; | | | | | |
| D-2354; | | | | | |
| D-2393 | | | | | |
| D-1389; | 1215-1235 | CCUGGAAUAUUAGAUGCCUU | 391 | AAAGGCAUCUAAUAUUCCAGGUU | 1060 |
| D-2077 | | | | | |
| D-1390; | 1216-1236 | CUGGAAUAUUAGAUGCCUUU | 392 | AAAAGGCAUCUAAUAUUCCAGUU | 1061 |
| D-2076 | | | | | |
| D-1391; | 1269-1289 | CAUGGUGUUUCAGAACUGAG | 393 | UCUCAGUUCUGAAACACCAUGUU | 1062 |
| D-2150 | | | | | |
| D-1392 | 1270-1290 | AUGGUGUUUCAGAACUGAGA | 394 | AUCUCAGUUCUGAAACACCAUUU | 1063 |
| D-1393 | 1271-1291 | UGGUGUUUCAGAACUGAGAC | 395 | AGUCUCAGUUCUGAAACACCAUU | 1064 |
| D-1394 | 1272-1292 | GGUGUUUCAGAACUGAGACC | 396 | AGGUCUCAGUUCUGAAACACCUU | 1065 |
| D-1395; | 1935-1955 | GAGGAGAAGAAAAGUGAUUC | 397 | UGAAUCACUUUUCUUCUCCUCUU | 1066 |
| D-2131 | | | | | |
| D-1396; | 1939-1959 | AGAAGAAAAGUGAUUCAGUG | 398 | UCACUGAAUCACUUUUCUUCUUU | 1067 |
| D-2070; | | | | | |
| D-2471 | | | | | |
| D-1397; | 1940-1960 | GAAGAAAAGUGAUUCAGUGA | 399 | AUCACUGAAUCACUUUUCUUCUU | 1068 |
| D-2151 | | | | | |
| D-1398 | 1943-1963 | GAAAAGUGAUUCAGUGAUUU | 400 | AAAAUCACUGAAUCACUUUUCUU | 1069 |
| D-1399; | 1945-1965 | AAAGUGAUUCAGUGAUUUCA | 401 | AUGAAAUCACUGAAUCACUUUUU | 1070 |
| D-2141 | | | | | |
| D-1400; | 1970-1990 | ACUACUGAAAACCUUUAAAG | 402 | ACUUUAAAGGUUUUCAGUAGUUU | 1071 |
| D-2069 | | | | | |
| D-1401; | 1972-1992 | UACUGAAAACCUUUAAAGGG | 403 | ACCCUUUAAAGGUUUUCAGUAUU | 1072 |
| D-2068 | | | | | |
| D-1402; | 2048-2068 | UGUAUAACUCUAAGAUCUGA | 404 | AUCAGAUCUUAGAGUUAUACAUU | 1073 |
| D-2065 | | | | | |
| D-1403; | 2050-2070 | UAUAACUCUAAGAUCUGAUG | 405 | UCAUCAGAUCUUAGAGUUAUAUU | 1074 |
| D-2302; | | | | | |
| D-2493; | | | | | |
| D-2505; | | | | | |
| D-2511 | | | | | |
| D-1404; | 2051-2071 | AUAACUCUAAGAUCUGAUGA | 406 | UUCAUCAGAUCUUAGAGUUAUUU | 1075 |
| D-2143 | | | | | |
| D-1405; | 2052-2072 | UAACUCUAAGAUCUGAUGAA | 407 | AUUCAUCAGAUCUUAGAGUUAUU | 1076 |
| D-2082; | | | | | |
| D-2313; | | | | | |
| D-2318; | | | | | |
| D-2323; | | | | | |
| D-2328; | | | | | |
| D-2333; | | | | | |
| D-2338; | | | | | |
| D-2343; | | | | | |
| D-2348; | | | | | |
| D-2353; | | | | | |
| D-2358; | | | | | |
| D-2397; | | | | | |
| D-2470 | | | | | |
| D-1406; | 2053-2073 | AACUCUAAGAUCUGAUGAAG | 408 | ACUUCAUCAGAUCUUAGAGUUUU | 1077 |
| D-2137 | | | | | |
| D-1407; | 2054-2074 | ACUCUAAGAUCUGAUGAAGU | 409 | UACUUCAUCAGAUCUUAGAGUUU | 1078 |
| D-2079; | | | | | |
| D-2247; | | | | | |
| D-2252; | | | | | |
| D-2266; | | | | | |
| D-2310; | | | | | |
| D-2315; | | | | | |
| D-2320; | | | | | |
| D-2325; | | | | | |
| D-2330; | | | | | |
| D-2335; | | | | | |
| D-2340; | | | | | |
| D-2345; | | | | | |
| D-2350; | | | | | |
| D-2355; | | | | | |
| D-2394 | | | | | |
| D-1408 | 57-77 | GAUUGGCCCGGAAGGGUUCA | 410 | AUGAACCCUUCCGGGCCAAUCUU | 1079 |
| D-1409 | 89-109 | CCUUUGGGCUCGGGGCCAAA | 411 | AUUUGGCCCCGAGCCCAAAGGUU | 1080 |
| D-1410 | 92-112 | UUGGGCUCGGGGCCAAAGGC | 412 | AGCCUUUGGCCCCGAGCCCAAUU | 1081 |
| D-1411 | 112-132 | CGCACCUUCCCCCAGCGGCC | 413 | AGGCCGCUGGGGGAAGGUGCGUU | 1082 |
| D-1412 | 159-179 | CCGCCGCCACCUCGCGGAGA | 414 | UUCUCCGCGAGGUGGCGGCGGUU | 1083 |
| D-1413 | 205-225 | UCCGCGCUGGCGCGCUUUGU | 415 | AACAAAGCGCGCCAGCGCGGAUU | 1084 |
| D-1414 | 206-226 | CCGCGCUGGCGCGCUUUGUC | 416 | AGACAAAGCGCGCCAGCGCGGUU | 1085 |
| D-1415 | 207-227 | CGCGCUGGCGCGCUUUGUCC | 417 | AGGACAAAGCGCGCCAGCGCGUU | 1086 |
| D-1416; | 215-235 | CGCGCUUUGUCCUCCUCGCG | 418 | ACGCGAGGAGGACAAAGCGCGUU | 1087 |
| D-2091 | | | | | |
| D-1417 | 216-236 | GCGCUUUGUCCUCCUCGCGC | 419 | UGCGCGAGGAGGACAAAGCGCUU | 1088 |
| D-1418 | 217-237 | CGCUUUGUCCUCCUCGCGCA | 420 | UUGCGCGAGGAGGACAAAGCGUU | 1089 |
| D-1419 | 218-238 | GCUUUGUCCUCCUCGCGCAA | 421 | AUUGCGCGAGGAGGACAAAGCUU | 1090 |
| D-1420; | 219-239 | CUUUGUCCUCCUCGCGCAAU | 422 | AAUUGCGCGAGGAGGACAAAGUU | 1091 |
| D-2093 | | | | | |
| D-1421; | 220-240 | UUUGUCCUCCUCGCGCAAUC | 423 | AGAUUGCGCGAGGAGGACAAAUU | 1092 |
| D-2095 | | | | | |
| D-1422 | 222-242 | UGUCCUCCUCGCGCAAUCCC | 424 | AGGGAUUGCGCGAGGAGGACAUU | 1093 |
| D-1423 | 223-243 | GUCCUCCUCGCGCAAUCCCG | 425 | ACGGGAUUGCGCGAGGAGGACUU | 1094 |
| D-1424 | 224-244 | UCCUCCUCGCGCAAUCCCGG | 426 | ACCGGGAUUGCGCGAGGAGGAUU | 1095 |
| D-1425 | 225-245 | CCUCCUCGCGCAAUCCCGGC | 427 | AGCCGGGAUUGCGCGAGGAGGUU | 1096 |
| D-1426 | 229-249 | CUCGCGCAAUCCCGGCCCGG | 428 | ACCGGGCCGGGAUUGCGCGAGUU | 1097 |
| D-1427 | 232-252 | GCGCAAUCCCGGCCCGGGUG | 429 | ACACCCGGGCCGGGAUUGCGCUU | 1098 |
| D-1428 | 233-253 | CGCAAUCCCGGCCCGGGUGG | 430 | ACCACCCGGGCCGGGAUUGCGUU | 1099 |
| D-1429 | 234-254 | GCAAUCCCGGCCCGGGUGGC | 431 | AGCCACCCGGGCCGGGAUUGCUU | 1100 |
| D-1430 | 242-262 | GGCCCGGGUGGCUCGGGGUU | 432 | AAACCCCGAGCCACCCGGGCCUU | 1101 |
| D-1431 | 243-263 | GCCCGGGUGGCUCGGGGUUG | 433 | ACAACCCCGAGCCACCCGGGCUU | 1102 |
| D-1432 | 244-264 | CCCGGGUGGCUCGGGGUUGC | 434 | AGCAACCCCGAGCCACCCGGGUU | 1103 |
| D-1433 | 254-274 | UCGGGGUUGCCGCGCUGGGC | 435 | AGCCCAGCGCGGCAACCCCGAUU | 1104 |
| D-1434 | 258-278 | GGUUGCCGCGCUGGGCCUGA | 436 | AUCAGGCCCAGCGCGGCAACCUU | 1105 |
| D-1435 | 262-282 | GCCGCGCUGGGCCUGACCGC | 437 | AGCGGUCAGGCCCAGCGCGGCUU | 1106 |
| D-1436 | 265-285 | GCGCUGGGCCUGACCGCGGU | 438 | AACCGCGGUCAGGCCCAGCGCUU | 1107 |
| D-1437 | 269-289 | UGGGCCUGACCGCGGUGGCG | 439 | ACGCCACCGCGGUCAGGCCCAUU | 1108 |
| D-1438 | 270-290 | GGGCCUGACCGCGGUGGCGC | 440 | AGCGCCACCGCGGUCAGGCCCUU | 1109 |
| D-1439; | 484-504 | GAGGGAAACAUGGUUACUGC | 441 | AGCAGUAACCAUGUUUCCCUCUU | 1110 |
| D-2122 | | | | | |
| D-1440 | 487-507 | GGAAACAUGGUUACUGCUCG | 442 | ACGAGCAGUAACCAUGUUUCCUU | 1111 |
| D-1441; | 488-508 | GAAACAUGGUUACUGCUCGC | 443 | AGCGAGCAGUAACCAUGUUUCUU | 1112 |
| D-2092 | | | | | |
| D-1442 | 489-509 | AAACAUGGUUACUGCUCGCC | 444 | UGGCGAGCAGUAACCAUGUUUUU | 1113 |
| D-1443 | 490-510 | AACAUGGUUACUGCUCGCCA | 445 | AUGGCGAGCAGUAACCAUGUUUU | 1114 |
| D-1444 | 491-511 | ACAUGGUUACUGCUCGCCAG | 446 | ACUGGCGAGCAGUAACCAUGUUU | 1115 |
| D-1445 | 496-516 | GUUACUGCUCGCCAGGAACC | 447 | AGGUUCCUGGCGAGCAGUAACUU | 1116 |
| D-1446 | 531-551 | UUCCCUGACCUGCGAUGGUG | 448 | UCACCAUCGCAGGUCAGGGAAUU | 1117 |
| D-1447 | 538-558 | ACCUGCGAUGGUGACACCCU | 449 | AAGGGUGUCACCAUCGCAGGUUU | 1118 |
| D-1448 | 566-586 | GUGCAGCCUACACAAAGGAC | 450 | AGUCCUUUGUGUAGGCUGCACUU | 1119 |
| D-1449 | 567-587 | UGCAGCCUACACAAAGGACC | 451 | AGGUCCUUUGUGUAGGCUGCAUU | 1120 |
| D-1450 | 569-589 | CAGCCUACACAAAGGACCUA | 452 | AUAGGUCCUUUGUGUAGGCUGUU | 1121 |
| D-1451; | 570-590 | AGCCUACACAAAGGACCUAC | 453 | AGUAGGUCCUUUGUGUAGGCUUU | 1122 |
| D-2086 | | | | | |
| D-1452 | 571-591 | GCCUACACAAAGGACCUACU | 454 | UAGUAGGUCCUUUGUGUAGGCUU | 1123 |
| D-1453 | 572-592 | CCUACACAAAGGACCUACUA | 455 | AUAGUAGGUCCUUUGUGUAGGUU | 1124 |
| D-1454 | 573-593 | CUACACAAAGGACCUACUAC | 456 | AGUAGUAGGUCCUUUGUGUAGUU | 1125 |
| D-1455; | 576-596 | CACAAAGGACCUACUACUGC | 457 | AGCAGUAGUAGGUCCUUUGUGUU | 1126 |
| D-2110 | | | | | |
| D-1456 | 581-601 | AGGACCUACUACUGCCUAUC | 458 | UGAUAGGCAGUAGUAGGUCCUUU | 1127 |
| D-1457 | 582-602 | GGACCUACUACUGCCUAUCA | 459 | UUGAUAGGCAGUAGUAGGUCCUU | 1128 |
| D-1458; | 584-604 | ACCUACUACUGCCUAUCAAA | 460 | UUUUGAUAGGCAGUAGUAGGUUU | 1129 |
| D-2134 | | | | | |
| D-1459; | 587-607 | UACUACUGCCUAUCAAAACG | 461 | ACGUUUUGAUAGGCAGUAGUAUU | 1130 |
| D-2135 | | | | | |
| D-1460; | 589-609 | CUACUGCCUAUCAAAACGCC | 462 | AGGCGUUUUGAUAGGCAGUAGUU | 1131 |
| D-2098 | | | | | |
| D-1461 | 594-614 | GCCUAUCAAAACGCCCACCA | 463 | AUGGUGGGCGUUUUGAUAGGCUU | 1132 |
| D-1462 | 610-630 | ACCACAAAUGCAGUGCACAA | 464 | AUUGUGCACUGCAUUUGUGGUUU | 1133 |
| D-1463 | 612-632 | CACAAAUGCAGUGCACAAGU | 465 | AACUUGUGCACUGCAUUUGUGUU | 1134 |
| D-1464 | 614-634 | CAAAUGCAGUGCACAAGUGC | 466 | UGCACUUGUGCACUGCAUUUGUU | 1135 |
| D-1465 | 617-637 | AUGCAGUGCACAAGUGCAGA | 467 | AUCUGCACUUGUGCACUGCAUUU | 1136 |
| D-1466 | 621-641 | AGUGCACAAGUGCAGAGUGC | 468 | UGCACUCUGCACUUGUGCACUUU | 1137 |
| D-1467 | 626-646 | ACAAGUGCAGAGUGCACGGC | 469 | AGCCGUGCACUCUGCACUUGUUU | 1138 |
| D-1468 | 627-647 | CAAGUGCAGAGUGCACGGCC | 470 | AGGCCGUGCACUCUGCACUUGUU | 1139 |
| D-1469 | 631-651 | UGCAGAGUGCACGGCCUGGA | 471 | AUCCAGGCCGUGCACUCUGCAUU | 1140 |
| D-1470 | 634-654 | AGAGUGCACGGCCUGGAGAU | 472 | UAUCUCCAGGCCGUGCACUCUUU | 1141 |
| D-1471 | 635-655 | GAGUGCACGGCCUGGAGAUA | 473 | AUAUCUCCAGGCCGUGCACUCUU | 1142 |
| D-1472 | 647-667 | UGGAGAUAGAGGGCAGGGAC | 474 | AGUCCCUGCCCUCUAUCUCCAUU | 1143 |
| D-1473 | 701-721 | UCCUGAAGUCACAGCCCUAC | 475 | AGUAGGGCUGUGACUUCAGGAUU | 1144 |
| D-1474 | 703-723 | CUGAAGUCACAGCCCUACCG | 476 | ACGGUAGGGCUGUGACUUCAGUU | 1145 |
| D-1475 | 705-725 | GAAGUCACAGCCCUACCGCC | 477 | AGGCGGUAGGGCUGUGACUUCUU | 1146 |
| D-1476 | 739-759 | CCUCACAUGCGACCGAGACG | 478 | ACGUCUCGGUCGCAUGUGAGGUU | 1147 |
| D-1477 | 740-760 | CUCACAUGCGACCGAGACGU | 479 | AACGUCUCGGUCGCAUGUGAGUU | 1148 |
| D-1478 | 741-761 | UCACAUGCGACCGAGACGUC | 480 | AGACGUCUCGGUCGCAUGUGAUU | 1149 |
| D-1479 | 742-762 | CACAUGCGACCGAGACGUCC | 481 | AGGACGUCUCGGUCGCAUGUGUU | 1150 |
| D-1480 | 743-763 | ACAUGCGACCGAGACGUCCU | 482 | AAGGACGUCUCGGUCGCAUGUUU | 1151 |
| D-1481 | 746-766 | UGCGACCGAGACGUCCUCAU | 483 | AAUGAGGACGUCUCGGUCGCAUU | 1152 |
| D-1482 | 747-767 | GCGACCGAGACGUCCUCAUC | 484 | UGAUGAGGACGUCUCGGUCGCUU | 1153 |
| D-1483 | 751-771 | CCGAGACGUCCUCAUCAAAU | 485 | UAUUUGAUGAGGACGUCUCGGUU | 1154 |
| D-1484 | 752-772 | CGAGACGUCCUCAUCAAAUA | 486 | AUAUUUGAUGAGGACGUCUCGUU | 1155 |
| D-1485 | 754-774 | AGACGUCCUCAUCAAAUAGC | 487 | UGCUAUUUGAUGAGGACGUCUUU | 1156 |
| D-1486 | 759-779 | UCCUCAUCAAAUAGCAGACU | 488 | AAGUCUGCUAUUUGAUGAGGAUU | 1157 |
| D-1487; | 761-781 | CUCAUCAAAUAGCAGACUUG | 489 | ACAAGUCUGCUAUUUGAUGAGUU | 1158 |
| D-2099 | | | | | |
| D-1488 | 809-829 | CAGACACCAGCCCAUUCUUG | 490 | UCAAGAAUGGGCUGGUGUCUGUU | 1159 |
| D-1489; | 810-830 | AGACACCAGCCCAUUCUUGA | 491 | AUCAAGAAUGGGCUGGUGUCUUU | 1160 |
| D-2100 | | | | | |
| D-1490 | 811-831 | GACACCAGCCCAUUCUUGAU | 492 | AAUCAAGAAUGGGCUGGUGUCUU | 1161 |
| D-1491; | 816-836 | CAGCCCAUUCUUGAUCCUUU | 493 | AAAAGGAUCAAGAAUGGGCUGUU | 1162 |
| D-2101 | | | | | |
| D-1492; | 820-840 | CCAUUCUUGAUCCUUUCUGA | 494 | AUCAGAAAGGAUCAAGAAUGGUU | 1163 |
| D-2112 | | | | | |
| D-1493; | 934-954 | GCAGAGGAUUCUUGGGAUGA | 495 | AUCAUCCCAAGAAUCCUCUGCUU | 1164 |
| D-2102 | | | | | |
| D-1494 | 941-961 | AUUCUUGGGAUGAGCUUCUU | 496 | UAAGAAGCUCAUCCCAAGAAUUU | 1165 |
| D-1495 | 944-964 | CUUGGGAUGAGCUUCUUAUU | 497 | AAAUAAGAAGCUCAUCCCAAGUU | 1166 |
| D-1496 | 947-967 | GGGAUGAGCUUCUUAUUGGU | 498 | AACCAAUAAGAAGCUCAUCCCUU | 1167 |
| D-1497 | 948-968 | GGAUGAGCUUCUUAUUGGUG | 499 | UCACCAAUAAGAAGCUCAUCCUU | 1168 |
| D-1498 | 970-990 | GUGGAACUGAAAAGGGUGAU | 500 | AAUCACCCUUUUCAGUUCCACUU | 1169 |
| D-1499 | 971-991 | UGGAACUGAAAAGGGUGAUG | 501 | ACAUCACCCUUUUCAGUUCCAUU | 1170 |
| D-1500 | 973-993 | GAACUGAAAAGGGUGAUGGC | 502 | AGCCAUCACCCUUUUCAGUUCUU | 1171 |
| D-1501 | 976-996 | CUGAAAAGGGUGAUGGCUUG | 503 | ACAAGCCAUCACCCUUUUCAGUU | 1172 |
| D-1502 | 977-997 | UGAAAAGGGUGAUGGCUUGU | 504 | AACAAGCCAUCACCCUUUUCAUU | 1173 |
| D-1503; | 978-998 | GAAAAGGGUGAUGGCUUGUU | 505 | AAACAAGCCAUCACCCUUUUCUU | 1174 |
| D-2096 | | | | | |
| D-1504; | 979-999 | AAAAGGGUGAUGGCUUGUUC | 506 | AGAACAAGCCAUCACCCUUUUUU | 1175 |
| D-2097 | | | | | |
| D-1505 | 1018-1038 | GUGGACCCAGACACCGGUGU | 507 | AACACCGGUGUCUGGGUCCACUU | 1176 |
| D-1506 | 1019-1039 | UGGACCCAGACACCGGUGUC | 508 | UGACACCGGUGUCUGGGUCCAUU | 1177 |
| D-1507 | 1020-1040 | GGACCCAGACACCGGUGUCA | 509 | AUGACACCGGUGUCUGGGUCCUU | 1178 |
| D-1508 | 1022-1042 | ACCCAGACACCGGUGUCAUG | 510 | UCAUGACACCGGUGUCUGGGUUU | 1179 |
| D-1509 | 1024-1044 | CCAGACACCGGUGUCAUGAG | 511 | ACUCAUGACACCGGUGUCUGGUU | 1180 |
| D-1510 | 1029-1049 | CACCGGUGUCAUGAGCAGGA | 512 | UUCCUGCUCAUGACACCGGUGUU | 1181 |
| D-1511 | 1036-1056 | GUCAUGAGCAGGAAGGAACC | 513 | AGGUUCCUUCCUGCUCAUGACUU | 1182 |
| D-1512 | 1039-1059 | AUGAGCAGGAAGGAACCGCU | 514 | AAGCGGUUCCUUCCUGCUCAUUU | 1183 |
| D-1513 | 1045-1065 | AGGAAGGAACCGCUGGAAAC | 515 | UGUUUCCAGCGGUUCCUUCCUUU | 1184 |
| D-1514 | 1046-1066 | GGAAGGAACCGCUGGAAACA | 516 | AUGUUUCCAGCGGUUCCUUCCUU | 1185 |
| D-1515; | 1047-1067 | GAAGGAACCGCUGGAAACAC | 517 | AGUGUUUCCAGCGGUUCCUUCUU | 1186 |
| D-2088 | | | | | |
| D-1516 | 1189-1209 | CUGGGCCAGUAAUGGGAACC | 518 | AGGUUCCCAUUACUGGCCCAGUU | 1187 |
| D-1517 | 1191-1211 | GGGCCAGUAAUGGGAACCGU | 519 | UACGGUUCCCAUUACUGGCCCUU | 1188 |
| D-1518 | 1192-1212 | GGCCAGUAAUGGGAACCGUA | 520 | AUACGGUUCCCAUUACUGGCCUU | 1189 |
| D-1519 | 1193-1213 | GCCAGUAAUGGGAACCGUAU | 521 | AAUACGGUUCCCAUUACUGGCUU | 1190 |
| D-1520 | 1194-1214 | CCAGUAAUGGGAACCGUAUG | 522 | ACAUACGGUUCCCAUUACUGGUU | 1191 |
| D-1521 | 1195-1215 | CAGUAAUGGGAACCGUAUGU | 523 | AACAUACGGUUCCCAUUACUGUU | 1192 |
| D-1522 | 1196-1216 | AGUAAUGGGAACCGUAUGUC | 524 | AGACAUACGGUUCCCAUUACUUU | 1193 |
| D-1523 | 1201-1221 | UGGGAACCGUAUGUCCUGGA | 525 | UUCCAGGACAUACGGUUCCCAUU | 1194 |
| D-1524 | 1203-1223 | GGAACCGUAUGUCCUGGAAU | 526 | UAUUCCAGGACAUACGGUUCCUU | 1195 |
| D-1525; | 1219-1239 | GAAUAUUAGAUGCCUUUUAA | 527 | UUUAAAAGGCAUCUAAUAUUCUU | 1196 |
| D-2113; | | | | | |
| D-2376; | | | | | |
| D-2380 | | | | | |
| D-1526; | 1227-1247 | GAUGCCUUUUAAAAAUGUUC | 528 | AGAACAUUUUUAAAAGGCAUCUU | 1197 |
| D-2108; | | | | | |
| D-2440; | | | | | |
| D-2444 | | | | | |
| D-1527 | 1275-1295 | GUUUCAGAACUGAGACCUCU | 529 | UAGAGGUCUCAGUUCUGAAACUU | 1198 |
| D-1528 | 1278-1298 | UCAGAACUGAGACCUCUACA | 530 | AUGUAGAGGUCUCAGUUCUGAUU | 1199 |
| D-1529 | 1283-1303 | ACUGAGACCUCUACAUUUUC | 531 | AGAAAAUGUAGAGGUCUCAGUUU | 1200 |
| D-1530 | 1284-1304 | CUGAGACCUCUACAUUUUCU | 532 | AAGAAAAUGUAGAGGUCUCAGUU | 1201 |
| D-1531 | 1285-1305 | UGAGACCUCUACAUUUUCUU | 533 | AAAGAAAAUGUAGAGGUCUCAUU | 1202 |
| D-1532; | 1313-1333 | UGAUUUUCACAUUUUUCGUC | 534 | AGACGAAAAAUGUGAAAAUCAUU | 1203 |
| D-2146 | | | | | |
| D-1533; | 1314-1334 | GAUUUUCACAUUUUUCGUCU | 535 | AAGACGAAAAAUGUGAAAAUCUU | 1204 |
| D-2111; | | | | | |
| D-2374; | | | | | |
| D-2375; | | | | | |
| D-2379; | | | | | |
| D-2383 | | | | | |
| D-1534 | 1315-1335 | AUUUUCACAUUUUUCGUCUU | 536 | AAAGACGAAAAAUGUGAAAAUUU | 1205 |
| D-1535 | 1317-1337 | UUUCACAUUUUUCGUCUUUU | 537 | AAAAAGACGAAAAAUGUGAAAUU | 1206 |
| D-1536 | 1318-1338 | UUCACAUUUUUCGUCUUUUG | 538 | ACAAAAGACGAAAAAUGUGAAUU | 1207 |
| D-1537 | 1319-1339 | UCACAUUUUUCGUCUUUUGG | 539 | UCCAAAAGACGAAAAAUGUGAUU | 1208 |
| D-1538 | 1321-1341 | ACAUUUUUCGUCUUUUGGAC | 540 | AGUCCAAAAGACGAAAAAUGUUU | 1209 |
| D-1539 | 1325-1345 | UUUUCGUCUUUUGGACUUCU | 541 | AAGAAGUCCAAAAGACGAAAAUU | 1210 |
| D-1540 | 1326-1346 | UUUCGUCUUUUGGACUUCUG | 542 | ACAGAAGUCCAAAAGACGAAAUU | 1211 |
| D-1541 | 1327-1347 | UUCGUCUUUUGGACUUCUGG | 543 | ACCAGAAGUCCAAAAGACGAAUU | 1212 |
| D-1542 | 1328-1348 | UCGUCUUUUGGACUUCUGGU | 544 | AACCAGAAGUCCAAAAGACGAUU | 1213 |
| D-1543 | 1332-1352 | CUUUUGGACUUCUGGUGUCU | 545 | AAGACACCAGAAGUCCAAAAGUU | 1214 |
| D-1544 | 1335-1355 | UUGGACUUCUGGUGUCUCAA | 546 | AUUGAGACACCAGAAGUCCAAUU | 1215 |
| D-1545 | 1337-1357 | GGACUUCUGGUGUCUCAAUG | 547 | ACAUUGAGACACCAGAAGUCCUU | 1216 |
| D-1546 | 1338-1358 | GACUUCUGGUGUCUCAAUGC | 548 | AGCAUUGAGACACCAGAAGUCUU | 1217 |
| D-1547 | 1341-1361 | UUCUGGUGUCUCAAUGCUUC | 549 | UGAAGCAUUGAGACACCAGAAUU | 1218 |
| D-1548 | 1356-1376 | GCUUCAAUGUCCCAGUGCAA | 550 | UUUGCACUGGGACAUUGAAGCUU | 1219 |
| D-1549; | 1362-1382 | AUGUCCCAGUGCAAAAAGUA | 551 | UUACUUUUUGCACUGGGACAUUU | 1220 |
| D-2075 | | | | | |
| D-1550 | 1363-1383 | UGUCCCAGUGCAAAAAGUAA | 552 | UUUACUUUUUGCACUGGGACAUU | 1221 |
| D-1551; | 1364-1384 | GUCCCAGUGCAAAAAGUAAA | 553 | AUUUACUUUUUGCACUGGGACUU | 1222 |
| D-2152 | | | | | |
| D-1552; | 1365-1385 | UCCCAGUGCAAAAAGUAAAG | 554 | UCUUUACUUUUUGCACUGGGAUU | 1223 |
| D-2157 | | | | | |
| D-1553 | 1369-1389 | AGUGCAAAAAGUAAAGAAAU | 555 | UAUUUCUUUACUUUUUGCACUUU | 1224 |
| D-1554 | 1382-1402 | AAGAAAUAUAGUCUCAAUAA | 556 | AUUAUUGAGACUAUAUUUCUUUU | 1225 |
| D-1555; | 1385-1405 | AAAUAUAGUCUCAAUAACUU | 557 | UAAGUUAUUGAGACUAUAUUUUU | 1226 |
| D-2136; | | | | | |
| D-2438; | | | | | |
| D-2442 | | | | | |
| D-1556; | 1387-1407 | AUAUAGUCUCAAUAACUUAG | 558 | ACUAAGUUAUUGAGACUAUAUUU | 1227 |
| D-2156 | | | | | |
| D-1557 | 1388-1408 | UAUAGUCUCAAUAACUUAGU | 559 | UACUAAGUUAUUGAGACUAUAUU | 1228 |
| D-1558 | 1389-1409 | AUAGUCUCAAUAACUUAGUA | 560 | AUACUAAGUUAUUGAGACUAUUU | 1229 |
| D-1559 | 1390-1410 | UAGUCUCAAUAACUUAGUAG | 561 | ACUACUAAGUUAUUGAGACUAUU | 1230 |
| D-1560 | 1391-1411 | AGUCUCAAUAACUUAGUAGG | 562 | UCCUACUAAGUUAUUGAGACUUU | 1231 |
| D-1561 | 1395-1415 | UCAAUAACUUAGUAGGACUU | 563 | AAAGUCCUACUAAGUUAUUGAUU | 1232 |
| D-1562 | 1396-1416 | CAAUAACUUAGUAGGACUUC | 564 | UGAAGUCCUACUAAGUUAUUGUU | 1233 |
| D-1563 | 1398-1418 | AUAACUUAGUAGGACUUCAG | 565 | ACUGAAGUCCUACUAAGUUAUUU | 1234 |
| D-1564 | 1400-1420 | AACUUAGUAGGACUUCAGUA | 566 | UUACUGAAGUCCUACUAAGUUUU | 1235 |
| D-1565 | 1401-1421 | ACUUAGUAGGACUUCAGUAA | 567 | AUUACUGAAGUCCUACUAAGUUU | 1236 |
| D-1566 | 1403-1423 | UUAGUAGGACUUCAGUAAGU | 568 | AACUUACUGAAGUCCUACUAAUU | 1237 |
| D-1567 | 1404-1424 | UAGUAGGACUUCAGUAAGUC | 569 | UGACUUACUGAAGUCCUACUAUU | 1238 |
| D-1568 | 1405-1425 | AGUAGGACUUCAGUAAGUCA | 570 | AUGACUUACUGAAGUCCUACUUU | 1239 |
| D-1569 | 1407-1427 | UAGGACUUCAGUAAGUCACU | 571 | AAGUGACUUACUGAAGUCCUAUU | 1240 |
| D-1570 | 1427-1447 | UAAAUGACAAGACAGGAUUC | 572 | AGAAUCCUGUCUUGUCAUUUAUU | 1241 |
| D-1571 | 1441-1461 | GGAUUCUGAAAACUCCCCGU | 573 | AACGGGGAGUUUUCAGAAUCCUU | 1242 |
| D-1572 | 1442-1462 | GAUUCUGAAAACUCCCCGUU | 574 | AAACGGGGAGUUUUCAGAAUCUU | 1243 |
| D-1573 | 1444-1464 | UUCUGAAAACUCCCCGUUUA | 575 | UUAAACGGGGAGUUUUCAGAAUU | 1244 |
| D-1574 | 1445-1465 | UCUGAAAACUCCCCGUUUAA | 576 | AUUAAACGGGGAGUUUUCAGAUU | 1245 |
| D-1575 | 1446-1466 | CUGAAAACUCCCCGUUUAAC | 577 | AGUUAAACGGGGAGUUUUCAGUU | 1246 |
| D-1576; | 1447-1467 | UGAAAACUCCCCGUUUAACU | 578 | AAGUUAAACGGGGAGUUUUCAUU | 1247 |
| D-2107 | | | | | |
| D-1577 | 1449-1469 | AAAACUCCCCGUUUAACUGA | 579 | AUCAGUUAAACGGGGAGUUUUUU | 1248 |
| D-1578 | 1452-1472 | ACUCCCCGUUUAACUGAUUA | 580 | AUAAUCAGUUAAACGGGGAGUUU | 1249 |
| D-1579 | 1453-1473 | CUCCCCGUUUAACUGAUUAU | 581 | AAUAAUCAGUUAAACGGGGAGUU | 1250 |
| D-1580; | 1454-1474 | UCCCCGUUUAACUGAUUAUG | 582 | ACAUAAUCAGUUAAACGGGGAUU | 1251 |
| D-2155 | | | | | |
| D-1581; | 1455-1475 | CCCCGUUUAACUGAUUAUGG | 583 | UCCAUAAUCAGUUAAACGGGGUU | 1252 |
| D-2116; | | | | | |
| D-2490; | | | | | |
| D-2502; | | | | | |
| D-2508 | | | | | |
| D-1582 | 1484-1504 | UUCUCCUGCUUCUCCGUUUA | 584 | AUAAACGGAGAAGCAGGAGAAUU | 1253 |
| D-1583 | 1485-1505 | UCUCCUGCUUCUCCGUUUAU | 585 | AAUAAACGGAGAAGCAGGAGAUU | 1254 |
| D-1584; | 1486-1506 | CUCCUGCUUCUCCGUUUAUC | 586 | AGAUAAACGGAGAAGCAGGAGUU | 1255 |
| D-2120 | | | | | |
| D-1585 | 1488-1508 | CCUGCUUCUCCGUUUAUCUA | 587 | AUAGAUAAACGGAGAAGCAGGUU | 1256 |
| D-1586 | 1491-1511 | GCUUCUCCGUUUAUCUACCA | 588 | UUGGUAGAUAAACGGAGAAGCUU | 1257 |
| D-1587 | 1492-1512 | CUUCUCCGUUUAUCUACCAA | 589 | AUUGGUAGAUAAACGGAGAAGUU | 1258 |
| D-1588 | 1493-1513 | UUCUCCGUUUAUCUACCAAG | 590 | UCUUGGUAGAUAAACGGAGAAUU | 1259 |
| D-1589 | 1494-1514 | UCUCCGUUUAUCUACCAAGA | 591 | AUCUUGGUAGAUAAACGGAGAUU | 1260 |
| D-1590 | 1495-1515 | CUCCGUUUAUCUACCAAGAG | 592 | ACUCUUGGUAGAUAAACGGAGUU | 1261 |
| D-1591 | 1496-1516 | UCCGUUUAUCUACCAAGAGC | 593 | AGCUCUUGGUAGAUAAACGGAUU | 1262 |
| D-1592 | 1498-1518 | CGUUUAUCUACCAAGAGCGC | 594 | UGCGCUCUUGGUAGAUAAACGUU | 1263 |
| D-1593 | 1501-1521 | UUAUCUACCAAGAGCGCAGA | 595 | AUCUGCGCUCUUGGUAGAUAAUU | 1264 |
| D-1594 | 1503-1523 | AUCUACCAAGAGCGCAGACU | 596 | AAGUCUGCGCUCUUGGUAGAUUU | 1265 |
| D-1595; | 1506-1526 | UACCAAGAGCGCAGACUUGC | 597 | UGCAAGUCUGCGCUCUUGGUAUU | 1266 |
| D-2072; | | | | | |
| D-2439; | | | | | |
| D-2443 | | | | | |
| D-1596; | 1507-1527 | ACCAAGAGCGCAGACUUGCA | 598 | AUGCAAGUCUGCGCUCUUGGUUU | 1267 |
| D-2087 | | | | | |
| D-1597; | 1509-1529 | CAAGAGCGCAGACUUGCAUC | 599 | AGAUGCAAGUCUGCGCUCUUGUU | 1268 |
| D-2147 | | | | | |
| D-1598 | 1510-1530 | AAGAGCGCAGACUUGCAUCC | 600 | AGGAUGCAAGUCUGCGCUCUUUU | 1269 |
| D-1599 | 1512-1532 | GAGCGCAGACUUGCAUCCUG | 601 | ACAGGAUGCAAGUCUGCGCUCUU | 1270 |
| D-1600 | 1514-1534 | GCGCAGACUUGCAUCCUGUC | 602 | UGACAGGAUGCAAGUCUGCGCUU | 1271 |
| D-1601 | 1515-1535 | CGCAGACUUGCAUCCUGUCA | 603 | AUGACAGGAUGCAAGUCUGCGUU | 1272 |
| D-1602; | 1517-1537 | CAGACUUGCAUCCUGUCACU | 604 | UAGUGACAGGAUGCAAGUCUGUU | 1273 |
| D-2121 | | | | | |
| D-1603 | 1521-1541 | CUUGCAUCCUGUCACUACCA | 605 | AUGGUAGUGACAGGAUGCAAGUU | 1274 |
| D-1604 | 1525-1545 | CAUCCUGUCACUACCACUCG | 606 | ACGAGUGGUAGUGACAGGAUGUU | 1275 |
| D-1605 | 1527-1547 | UCCUGUCACUACCACUCGUU | 607 | UAACGAGUGGUAGUGACAGGAUU | 1276 |
| D-1606; | 1528-1548 | CCUGUCACUACCACUCGUUA | 608 | AUAACGAGUGGUAGUGACAGGUU | 1277 |
| D-2090 | | | | | |
| D-1607 | 1529-1549 | CUGUCACUACCACUCGUUAG | 609 | UCUAACGAGUGGUAGUGACAGUU | 1278 |
| D-1608 | 1530-1550 | UGUCACUACCACUCGUUAGA | 610 | AUCUAACGAGUGGUAGUGACAUU | 1279 |
| D-1609 | 1534-1554 | ACUACCACUCGUUAGAGAAA | 611 | AUUUCUCUAACGAGUGGUAGUUU | 1280 |
| D-1610 | 1572-1592 | AAGAGUGGGUGGGCUGGAAG | 612 | UCUUCCAGCCCACCCACUCUUUU | 1281 |
| D-1611; | 1596-1616 | UCCUAGAAUGUGUUAUUGCC | 613 | AGGCAAUAACACAUUCUAGGAUU | 1282 |
| D-2124 | | | | | |
| D-1612 | 1597-1617 | CCUAGAAUGUGUUAUUGCCC | 614 | AGGGCAAUAACACAUUCUAGGUU | 1283 |
| D-1613 | 1602-1622 | AAUGUGUUAUUGCCCCUGUU | 615 | AAACAGGGGCAAUAACACAUUUU | 1284 |
| D-1614 | 1605-1625 | GUGUUAUUGCCCCUGUUCAU | 616 | AAUGAACAGGGGCAAUAACACUU | 1285 |
| D-1615 | 1608-1628 | UUAUUGCCCCUGUUCAUGAG | 617 | ACUCAUGAACAGGGGCAAUAAUU | 1286 |
| D-1616 | 1610-1630 | AUUGCCCCUGUUCAUGAGGU | 618 | UACCUCAUGAACAGGGGCAAUUU | 1287 |
| D-1617 | 1634-1654 | AAUGAAAAUUAAAUUGCACC | 619 | AGGUGCAAUUUAAUUUUCAUUUU | 1288 |
| D-1618 | 1635-1655 | AUGAAAAUUAAAUUGCACCC | 620 | AGGGUGCAAUUUAAUUUUCAUUU | 1289 |
| D-1619 | 1639-1659 | AAAUUAAAUUGCACCCCAAA | 621 | AUUUGGGGUGCAAUUUAAUUUUU | 1290 |
| D-1620 | 1641-1661 | AUUAAAUUGCACCCCAAAUA | 622 | AUAUUUGGGGUGCAAUUUAAUUU | 1291 |
| D-1621 | 1642-1662 | UUAAAUUGCACCCCAAAUAU | 623 | AAUAUUUGGGGUGCAAUUUAAUU | 1292 |
| D-1622 | 1645-1665 | AAUUGCACCCCAAAUAUGGC | 624 | AGCCAUAUUUGGGGUGCAAUUUU | 1293 |
| D-1623 | 1646-1666 | AUUGCACCCCAAAUAUGGCU | 625 | AAGCCAUAUUUGGGGUGCAAUUU | 1294 |
| D-1624 | 1658-1678 | AUAUGGCUGGAAUGCCACUU | 626 | AAAGUGGCAUUCCAGCCAUAUUU | 1295 |
| D-1625 | 1665-1685 | UGGAAUGCCACUUCCCUUUU | 627 | AAAAAGGGAAGUGGCAUUCCAUU | 1296 |
| D-1626; | 1676-1696 | UUCCCUUUUCUUCUCAAGCC | 628 | AGGCUUGAGAAGAAAAGGGAAUU | 1297 |
| D-2089 | | | | | |
| D-1627 | 1684-1704 | UCUUCUCAAGCCCCGGGCUA | 629 | AUAGCCCGGGGCUUGAGAAGAUU | 1298 |
| D-1628 | 1687-1707 | UCUCAAGCCCCGGGCUAGCU | 630 | AAGCUAGCCCGGGGCUUGAGAUU | 1299 |
| D-1629 | 1704-1724 | GCUUUUGAAAUGGCAUAAAG | 631 | UCUUUAUGCCAUUUCAAAAGCUU | 1300 |
| D-1630 | 1707-1727 | UUUGAAAUGGCAUAAAGACU | 632 | AAGUCUUUAUGCCAUUUCAAAUU | 1301 |
| D-1631 | 1712-1732 | AAUGGCAUAAAGACUGAGGU | 633 | AACCUCAGUCUUUAUGCCAUUUU | 1302 |
| D-1632; | 1714-1734 | UGGCAUAAAGACUGAGGUGA | 634 | AUCACCUCAGUCUUUAUGCCAUU | 1303 |
| D-2123 | | | | | |
| D-1633; | 1716-1736 | GCAUAAAGACUGAGGUGACC | 635 | AGGUCACCUCAGUCUUUAUGCUU | 1304 |
| D-2094 | | | | | |
| D-1634 | 1741-1761 | GAAGCACUGCAGAUAUUAAU | 636 | AAUUAAUAUCUGCAGUGCUUCUU | 1305 |
| D-1635; | 1813-1833 | CUAAAGGUGCUCAGGAGGAU | 637 | AAUCCUCCUGAGCACCUUUAGUU | 1306 |
| D-2103 | | | | | |
| D-1636 | 1817-1837 | AGGUGCUCAGGAGGAUGGUU | 638 | AAACCAUCCUCCUGAGCACCUUU | 1307 |
| D-1637 | 1819-1839 | GUGCUCAGGAGGAUGGUUGU | 639 | AACAACCAUCCUCCUGAGCACUU | 1308 |
| D-1638 | 1827-1847 | GAGGAUGGUUGUGUAGUCAU | 640 | AAUGACUACACAACCAUCCUCUU | 1309 |
| D-1639 | 1828-1848 | AGGAUGGUUGUGUAGUCAUG | 641 | ACAUGACUACACAACCAUCCUUU | 1310 |
| D-1640 | 1829-1849 | GGAUGGUUGUGUAGUCAUGG | 642 | UCCAUGACUACACAACCAUCCUU | 1311 |
| D-1641 | 1835-1855 | UUGUGUAGUCAUGGAGGACC | 643 | AGGUCCUCCAUGACUACACAAUU | 1312 |
| D-1642 | 1843-1863 | UCAUGGAGGACCCCUGGAUC | 644 | AGAUCCAGGGGUCCUCCAUGAUU | 1313 |
| D-1643 | 1869-1889 | AUUCCCCUCAGCUAAUGACG | 645 | ACGUCAUUAGCUGAGGGGAAUUU | 1314 |
| D-1644 | 1870-1890 | UUCCCCUCAGCUAAUGACGG | 646 | UCCGUCAUUAGCUGAGGGGAAUU | 1315 |
| D-1645 | 1871-1891 | UCCCCUCAGCUAAUGACGGA | 647 | AUCCGUCAUUAGCUGAGGGGAUU | 1316 |
| D-1646 | 1876-1896 | UCAGCUAAUGACGGAGUGCU | 648 | AAGCACUCCGUCAUUAGCUGAUU | 1317 |
| D-1647 | 1914-1934 | GAAAAAGUUCUGAAUUCUGU | 649 | AACAGAAUUCAGAACUUUUUCUU | 1318 |
| D-1648 | 1919-1939 | AGUUCUGAAUUCUGUGGAGG | 650 | UCCUCCACAGAAUUCAGAACUUU | 1319 |
| D-1649 | 1955-1975 | AGUGAUUUCAGAUAGACUAC | 651 | AGUAGUCUAUCUGAAAUCACUUU | 1320 |
| D-1650 | 1959-1979 | AUUUCAGAUAGACUACUGAA | 652 | UUUCAGUAGUCUAUCUGAAAUUU | 1321 |
| D-1651; | 1963-1983 | CAGAUAGACUACUGAAAACC | 653 | AGGUUUUCAGUAGUCUAUCUGUU | 1322 |
| D-2148 | | | | | |
| D-1652 | 1967-1987 | UAGACUACUGAAAACCUUUA | 654 | UUAAAGGUUUUCAGUAGUCUAUU | 1323 |
| D-1653 | 1968-1988 | AGACUACUGAAAACCUUUAA | 655 | UUUAAAGGUUUUCAGUAGUCUUU | 1324 |
| D-1654; | 1996-2016 | AAGGAAAGCAUAUGUCAGUU | 656 | AAACUGACAUAUGCUUUCCUUUU | 1325 |
| D-2114 | | | | | |
| D-1655; | 1997-2017 | AGGAAAGCAUAUGUCAGUUG | 657 | ACAACUGACAUAUGCUUUCCUUU | 1326 |
| D-2115; | | | | | |
| D-2377; | | | | | |
| D-2381 | | | | | |
| D-1656; | 1998-2018 | GGAAAGCAUAUGUCAGUUGU | 658 | AACAACUGACAUAUGCUUUCCUU | 1327 |
| D-2117 | | | | | |
| D-1657; | 2000-2020 | AAAGCAUAUGUCAGUUGUUU | 659 | UAAACAACUGACAUAUGCUUUUU | 1328 |
| D-2104 | | | | | |
| D-1658 | 2001-2021 | AAGCAUAUGUCAGUUGUUUA | 660 | UUAAACAACUGACAUAUGCUUUU | 1329 |
| D-1659 | 2002-2022 | AGCAUAUGUCAGUUGUUUAA | 661 | UUUAAACAACUGACAUAUGCUUU | 1330 |
| D-1660 | 2019-2039 | UAAAACCCAAUAUCUAUUUU | 662 | AAAAAUAGAUAUUGGGUUUUAUU | 1331 |
| D-1661 | 2022-2042 | AACCCAAUAUCUAUUUUUUA | 663 | UUAAAAAAUAGAUAUUGGGUUUU | 1332 |
| D-1662; | 2039-2059 | UUAACUGAUUGUAUAACUCU | 664 | UAGAGUUAUACAAUCAGUUAAUU | 1333 |
| D-2105 | | | | | |
| D-1663; | 2040-2060 | UAACUGAUUGUAUAACUCUA | 665 | UUAGAGUUAUACAAUCAGUUAUU | 1334 |
| D-2106 | | | | | |
| D-1664; | 2042-2062 | ACUGAUUGUAUAACUCUAAG | 666 | UCUUAGAGUUAUACAAUCAGUUU | 1335 |
| D-2153 | | | | | |
| D-1665 | 2043-2063 | CUGAUUGUAUAACUCUAAGA | 667 | AUCUUAGAGUUAUACAAUCAGUU | 1336 |
| D-1666 | 2045-2065 | GAUUGUAUAACUCUAAGAUC | 668 | AGAUCUUAGAGUUAUACAAUCUU | 1337 |
| D-1667; | 2086-2106 | GCCAUUUUGUCCUUUGAUUA | 669 | AUAAUCAAAGGACAAAAUGGCUU | 1338 |
| D-2118; | | | | | |
| D-2378; | | | | | |
| D-2382 | | | | | |
| D-1668 | 2093-2113 | UGUCCUUUGAUUAUAUUGGG | 670 | UCCCAAUAUAAUCAAAGGACAUU | 1339 |
| D-2179 | 682-704 | CCAGUGGAUAACCAGCUUCC | 46 | AGGAAGCUGGUUAUCCACUGGUG | 2914 |
| D-2192 | 684-704 | CCAGUGGAUAACCAGCUUCC | 46 | AGGAAGCUGGUUAUCCACUGG | 2922 |
| D-2177 | 1092-1114 | CAGAACGAAAGUUAUAUGGA | 98 | UUCCAUAUAACUUUCGUUCUGUG | 2912 |
| D-2190 | 1094-1114 | CAGAACGAAAGUUAUAUGGA | 98 | UUCCAUAUAACUUUCGUUCUG | 2920 |
| D-2462 | 1092-1114 | CAGAACGAAAGUUAUAUGGA | 98 | UUCCAUAUAACUUUCGUUCUGAA | 2992 |
| D-2483 | 768-788 | AAUAGCAGACUUGUUCCGAC | 101 | AGUCGGAACAAGUCUGCUAUU | 3003 |
| D-2181 | 794-816 | CAGAUUGCUUACUCAGACAC | 115 | AGUGUCUGAGUAAGCAAUCUGUG | 2916 |
| D-2194 | 796-816 | CAGAUUGCUUACUCAGACAC | 115 | AGUGUCUGAGUAAGCAAUCUG | 2924 |
| D-2175 | 892-914 | CUUCAGGCCCAAUAUUGUAA | 142 | AUUACAAUAUUGGGCCUGAAGUG | 2910 |
| D-2188 | 894-914 | CUUCAGGCCCAAUAUUGUAA | 142 | AUUACAAUAUUGGGCCUGAAG | 2918 |
| D-2223 | 1110-1130 | UGGAAAAUCACCACUCUUUG | 152 | ACAAAGAGUGGUGAUUUUCCA | 2937 |
| D-2464 | 1108-1130 | UGGAAAAUCACCACUCUUUG | 152 | ACAAAGAGUGGUGAUUUUCCAUA | 2994 |
| D-2226 | 1255-1275 | GACAACACUUGAAGCAUGGU | 168 | AACCAUGCUUCAAGUGUUGUC | 2940 |
| D-2488 | 1346-1366 | GUGUCUCAAUGCUUCAAUGU | 175 | AACAUUGAAGCAUUGAGACAC | 3008 |
| D-2219 | 1350-1370 | CUCAAUGCUUCAAUGUCCCA | 178 | AUGGGACAUUGAAGCAUUGAG | 2933 |
| D-2176 | 1350-1372 | CAAUGCUUCAAUGUCCCAGU | 179 | AACUGGGACAUUGAAGCAUUGUG | 2911 |
| D-2182; | 1350-1372 | CAAUGCUUCAAUGUCCCAGU | 179 | AACUGGGACAUUGAAGCAUUGAG | 2917 |
| D-2389; | | | | | |
| D-2391; | | | | | |
| D-2401; | | | | | |
| D-2402; | | | | | |
| D-2403 | | | | | |
| D-2189; | 1352-1372 | CAAUGCUUCAAUGUCCCAGU | 179 | AACUGGGACAUUGAAGCAUUG | 2919 |
| D-2384; | | | | | |
| D-2385; | | | | | |
| D-2399 | | | | | |
| D-2221 | 1355-1375 | UGCUUCAAUGUCCCAGUGCA | 181 | UUGCACUGGGACAUUGAAGCA | 2935 |
| D-2225 | 1438-1458 | ACAGGAUUCUGAAAACUCCC | 186 | AGGGAGUUUUCAGAAUCCUGU | 2939 |
| D-2222 | 1794-1814 | UCAGACAGCAUUGGAUUUCC | 215 | AGGAAAUCCAAUGCUGUCUGA | 2936 |
| D-2224 | 1796-1816 | AGACAGCAUUGGAUUUCCUA | 217 | UUAGGAAAUCCAAUGCUGUCU | 2938 |
| D-2220 | 2014-2034 | UUGUUUAAAACCCAAUAUCU | 245 | UAGAUAUUGGGUUUUAAACAA | 2934 |
| D-2461 | 2012-2034 | UUGUUUAAAACCCAAUAUCU | 245 | UAGAUAUUGGGUUUUAAACAACU | 2991 |
| D-2180 | 2055-2077 | CUAAGAUCUGAUGAAGUAUA | 247 | AUAUACUUCAUCAGAUCUUAGUG | 2915 |
| D-2193 | 2057-2077 | CUAAGAUCUGAUGAAGUAUA | 247 | AUAUACUUCAUCAGAUCUUAG | 2923 |
| D-2463 | 2055-2077 | CUAAGAUCUGAUGAAGUAUA | 247 | AUAUACUUCAUCAGAUCUUAGAG | 2993 |
| D-2472 | 2057-2077 | AAGAUCUGAUGAAGUAUAUU | 249 | AUAUACUUCAUCAGAUCUUAG | 2923 |
| D-2178 | 2109-2131 | GGAAGUUGACUAAACUUGAA | 258 | UUUCAAGUUUAGUCAACUUCCUG | 2913 |
| D-2191 | 2111-2131 | GGAAGUUGACUAAACUUGAA | 258 | UUUCAAGUUUAGUCAACUUCC | 2921 |
| D-2486 | 2082-2102 | UAUUGCCAUUUUGUCCUUUG | 268 | UCAAAGGACAAAAUGGCAAUA | 3006 |
| D-2109 | 2113-2133 | AAGUUGACUAAACUUGAAAA | 270 | UUUUUCAAGUUUAGUCAACUUUU | 2906 |
| D-2485 | 1253-1273 | AUGACAACACUUGAAGCAUG | 301 | ACAUGCUUCAAGUGUUGUCAU | 3005 |
| D-2254 | 985-1005 | GUGAUGGCUUGUUCCAGAUG | 369 | ACAUCUGGAACAAGCCAUCAC | 2952 |
| D-2437 | 1211-1231 | AUGUCCUGGAAUAUUAGAUG | 387 | ACAUCUAAUAUUCCAGGACAU | 2982 |
| D-2255 | 1212-1232 | UGUCCUGGAAUAUUAGAUGC | 388 | AGCAUCUAAUAUUCCAGGACA | 2953 |
| D-2256 | 1213-1233 | GUCCUGGAAUAUUAGAUGCC | 389 | AGGCAUCUAAUAUUCCAGGAC | 2954 |
| D-2258 | 1214-1234 | UCCUGGAAUAUUAGAUGCCU | 390 | AAGGCAUCUAAUAUUCCAGGA | 2956 |
| D-2241; | 1215-1233 | CCUGGAAUAUUAGAUGCCUU | 391 | AGGCAUCUAAUAUUCCAGGUU | 2949 |
| D-2482 | | | | | |
| D-2243 | 1216-1234 | CUGGAAUAUUAGAUGCCUUU | 392 | AAGGCAUCUAAUAUUCCAGUU | 2951 |
| D-2466 | 1939-1959 | AGAAGAAAAGUGAUUCAGUG | 398 | UCACUGAAUCACUUUUCUUCU | 2996 |
| D-2469 | 1937-1959 | AGAAGAAAAGUGAUUCAGUG | 398 | UCACUGAAUCACUUUUCUUCUCC | 2999 |
| D-2487 | 2050-2070 | UAUAACUCUAAGAUCUGAUG | 405 | UCAUCAGAUCUUAGAGUUAUA | 3007 |
| D-2465 | 2052-2072 | UAACUCUAAGAUCUGAUGAA | 407 | AUUCAUCAGAUCUUAGAGUUA | 2995 |
| D-2468 | 2050-2072 | UAACUCUAAGAUCUGAUGAA | 407 | AUUCAUCAGAUCUUAGAGUUAUA | 2998 |
| D-2257 | 2054-2074 | ACUCUAAGAUCUGAUGAAGU | 409 | UACUUCAUCAGAUCUUAGAGU | 2955 |
| D-2431 | 1219-1239 | GAAUAUUAGAUGCCUUUUAA | 527 | UUUAAAAGGCAUCUAAUAUUC | 2976 |
| D-2436 | 1227-1247 | GAUGCCUUUUAAAAAUGUUC | 528 | AGAACAUUUUUAAAAGGCAUC | 2981 |
| D-2430 | 1314-1334 | GAUUUUCACAUUUUUCGUCU | 535 | AAGACGAAAAAUGUGAAAAUC | 2975 |
| D-2467 | 1312-1334 | GAUUUUCACAUUUUUCGUCU | 535 | AAGACGAAAAAUGUGAAAAUCAC | 2997 |
| D-2434 | 1385-1405 | AAAUAUAGUCUCAAUAACUU | 557 | UAAGUUAUUGAGACUAUAUUU | 2979 |
| D-2484 | 1455-1475 | CCCCGUUUAACUGAUUAUGG | 583 | UCCAUAAUCAGUUAAACGGGG | 3004 |
| D-2435 | 1506-1526 | UACCAAGAGCGCAGACUUGC | 597 | UGCAAGUCUGCGCUCUUGGUA | 2980 |
| D-2480 | 1504-1526 | UACCAAGAGCGCAGACUUGC | 597 | UGCAAGUCUGCGCUCUUGGUAGA | 3002 |
| D-2432 | 1997-2017 | AGGAAAGCAUAUGUCAGUUG | 657 | ACAACUGACAUAUGCUUUCCU | 2977 |
| D-2433 | 2086-2106 | GCCAUUUUGUCCUUUGAUUA | 669 | AUAAUCAAAGGACAAAAUGGC | 2978 |
| D-2158; | 1354-1372 | AUGCUUCAAUGUCCCAGUUU | 2804 | AACUGGGACAUUGAAGCAUUU | 2907 |
| D-2387; | | | | | |
| D-2390; | | | | | |
| D-2400 | | | | | |
| D-2386; | 1352-1372 | AUGCUUCAAUGUCCCAGUUU | 2804 | AACUGGGACAUUGAAGCAUUG | 2919 |
| D-2392 | | | | | |
| D-2159 | 1096-1114 | GAACGAAAGUUAUAUGGAAU | 2805 | UUCCAUAUAACUUUCGUUCUU | 2908 |
| D-2479 | 1094-1114 | GAACGAAAGUUAUAUGGAAU | 2805 | UUCCAUAUAACUUUCGUUCUG | 2920 |
| D-2160 | 798-816 | GAUUGCUUACUCAGACACUU | 2806 | AGUGUCUGAGUAAGCAAUCUU | 2909 |
| D-2195 | 1352-1370 | CAAUGCUUCAAUGUCCCAUU | 2807 | AUGGGACAUUGAAGCAUUGUU | 2925 |
| D-2196 | 2016-2034 | GUUUAAAACCCAAUAUCUAU | 2808 | UAGAUAUUGGGUUUUAAACUU | 2926 |
| D-2197 | 1357-1375 | CUUCAAUGUCCCAGUGCAAU | 2809 | UUGCACUGGGACAUUGAAGUU | 2927 |
| D-2198 | 1796-1814 | AGACAGCAUUGGAUUUCCUU | 2810 | AGGAAAUCCAAUGCUGUCUUU | 2928 |
| D-2199 | 1112-1130 | GAAAAUCACCACUCUUUGUU | 2811 | ACAAAGAGUGGUGAUUUUCUU | 2929 |
| D-2475 | 1110-1130 | GAAAAUCACCACUCUUUGUU | 2811 | ACAAAGAGUGGUGAUUUUCCA | 2937 |
| D-2200 | 1798-1816 | ACAGCAUUGGAUUUCCUAAU | 2812 | UUAGGAAAUCCAAUGCUGUUU | 2930 |
| D-2201 | 1440-1458 | AGGAUUCUGAAAACUCCCUU | 2813 | AGGGAGUUUUCAGAAUCCUUU | 2931 |
| D-2202 | 1257-1275 | CAACACUUGAAGCAUGGUUU | 2814 | AACCAUGCUUCAAGUGUUGUU | 2932 |
| D-2233 | 2014-2034 | CUGUUUAAAACCCAAUAUCU | 2815 | UAGAUAUUGGGUUUUAAACAGUU | 2941 |
| D-2234 | 1355-1375 | CGCUUCAAUGUCCCAGUGCA | 2816 | UUGCACUGGGACAUUGAAGCGUU | 2942 |
| D-2235 | 1794-1814 | CCAGACAGCAUUGGAUUUCC | 2817 | AGGAAAUCCAAUGCUGUCUGGUU | 2943 |
| D-2236 | 1110-1130 | CGGAAAAUCACCACUCUUUG | 2818 | ACAAAGAGUGGUGAUUUUCCGUU | 2944 |
| D-2237 | 1796-1816 | GGACAGCAUUGGAUUUCCUA | 2819 | UUAGGAAAUCCAAUGCUGUCCUU | 2945 |
| D-2238 | 1438-1458 | GCAGGAUUCUGAAAACUCCC | 2820 | AGGGAGUUUUCAGAAUCCUGCUU | 2946 |
| D-2239 | 987-1005 | GAUGGCUUGUUCCAGAUGUU | 2821 | ACAUCUGGAACAAGCCAUCUU | 2947 |
| D-2240 | 1214-1232 | UCCUGGAAUAUUAGAUGCUU | 2822 | AGCAUCUAAUAUUCCAGGAUU | 2948 |
| D-2242 | 2056-2074 | UCUAAGAUCUGAUGAAGUAU | 2823 | UACUUCAUCAGAUCUUAGAUU | 2950 |
| D-2259 | 1214-1234 | CCCUGGAAUAUUAGAUGCCU | 2824 | AAGGCAUCUAAUAUUCCAGGGUU | 2957 |
| D-2260; | 2054-2074 | GCUCUAAGAUCUGAUGAAGU | 2825 | UACUUCAUCAGAUCUUAGAGCUU | 2958 |
| D-2454; | | | | | |
| D-2455; | | | | | |
| D-2456 | | | | | |
| D-2261 | 1212-1232 | CGUCCUGGAAUAUUAGAUGC | 2826 | AGCAUCUAAUAUUCCAGGACGUU | 2959 |
| D-2262 | 2052-2072 | CAACUCUAAGAUCUGAUGAA | 2827 | AUUCAUCAGAUCUUAGAGUUGUU | 2960 |
| D-2263 | 1939-1959 | GGAAGAAAAGUGAUUCAGUG | 2828 | UCACUGAAUCACUUUUCUUCCUU | 2961 |
| D-2268 | 1213-1233 | GUCCAGGAAUAUUAGAUGCC | 2829 | AGGCAUCUAAUAUUCCUGGACUU | 2962 |
| D-2269 | 1213-1233 | GUGCUGGAAUAUUAGAUGCC | 2830 | AGGCAUCUAAUAUUCCAGCACUU | 2963 |
| D-2270 | 1214-1234 | UCCUCGAAUAUUAGAUGCCU | 2831 | AAGGCAUCUAAUAUUCGAGGAUU | 2964 |
| D-2271 | 1214-1234 | UCGUGGAAUAUUAGAUGCCU | 2832 | AAGGCAUCUAAUAUUCCACGAUU | 2965 |
| D-2272 | 2054-2074 | ACACUAAGAUCUGAUGAAGU | 2833 | UACUUCAUCAGAUCUUAGUGUUU | 2966 |
| D-2273 | 2054-2074 | AGUCUAAGAUCUGAUGAAGU | 2834 | UACUUCAUCAGAUCUUAGACUUU | 2967 |
| D-2274 | 1796-1816 | AGUCAGCAUUGGAUUUCCUA | 2835 | UUAGGAAAUCCAAUGCUGACUUU | 2968 |
| D-2275 | 1796-1816 | ACACAGCAUUGGAUUUCCUA | 2836 | UUAGGAAAUCCAAUGCUGUGUUU | 2969 |
| D-2359; | 986-1006 | UGAUGGCUUGUUCCAGAUGC | 2837 | UGCAUCUGGAACAAGCCAUCAUU | 2970 |
| D-2364; | | | | | |
| D-2369 | | | | | |
| D-2360; | 987-1007 | GAUGGCUUGUUCCAGAUGCA | 2838 | AUGCAUCUGGAACAAGCCAUCUU | 2971 |
| D-2365; | | | | | |
| D-2370 | | | | | |
| D-2361; | 1793-1813 | CUCAGACAGCAUUGGAUUUC | 2839 | AGAAAUCCAAUGCUGUCUGAGUU | 2972 |
| D-2366; | | | | | |
| D-2371 | | | | | |
| D-2362; | 2085-2105 | UGCCAUUUUGUCCUUUGAUU | 2840 | UAAUCAAAGGACAAAAUGGCAUU | 2973 |
| D-2367; | | | | | |
| D-2372 | | | | | |
| D-2363 | 2087-2107 | CCAUUUUGUCCUUUGAUUAU | 2841 | UAUAAUCAAAGGACAAAAUGGUU | 2974 |
| D-2368 | | | | | |
| D-2373 | | | | | |
| D-2446 | 1316-1334 | UUUUCACAUUUUUCGUCUUU | 2842 | AAGACGAAAAAUGUGAAAAUU | 2983 |
| D-2476 | 1314-1334 | UUUUCACAUUUUUCGUCUUU | 2842 | AAGACGAAAAAUGUGAAAAUC | 2975 |
| D-2473 | 2054-2072 | ACUCUAAGAUCUGAUGAAUU | 2843 | AUUCAUCAGAUCUUAGAGUUU | 3000 |
| D-2477 | 2052-2072 | ACUCUAAGAUCUGAUGAAUU | 2843 | AUUCAUCAGAUCUUAGAGUUA | 2995 |
| D-2474 | 1941-1959 | AAGAAAAGUGAUUCAGUGAU | 2844 | UCACUGAAUCACUUUUCUUUU | 3001 |
| D-2478 | 1939-1959 | AAGAAAAGUGAUUCAGUGAU | 2844 | UCACUGAAUCACUUUUCUUCU | 2996 |
| D-2447 | 1221-1239 | AUAUUAGAUGCCUUUUAAAU | 2845 | UUUAAAAGGCAUCUAAUAUUU | 2984 |
| D-2448 | 1999-2017 | GAAAGCAUAUGUCAGUUGUU | 2846 | ACAACUGACAUAUGCUUUCUU | 2985 |
| D-2449 | 2088-2106 | CAUUUUGUCCUUUGAUUAUU | 2847 | AUAAUCAAAGGACAAAAUGUU | 2986 |
| D-2450 | 1387-1405 | AUAUAGUCUCAAUAACUUAU | 2848 | UAAGUUAUUGAGACUAUAUUU | 2979 |
| D-2451 | 1508-1526 | CCAAGAGCGCAGACUUGCAU | 2849 | UGCAAGUCUGCGCUCUUGGUU | 2987 |
| D-2481 | 1506-1526 | CCAAGAGCGCAGACUUGCAU | 2849 | UGCAAGUCUGCGCUCUUGGUA | 2980 |
| D-2452 | 1229-1247 | UGCCUUUUAAAAAUGUUCUU | 2850 | AGAACAUUUUUAAAAGGCAUU | 2988 |
| D-2453 | 1213-1231 | GUCCUGGAAUAUUAGAUGUU | 2851 | ACAUCUAAUAUUCCAGGACUU | 2989 |
| D-2457 | 2056-2074 | CCUAAGAUCUGAUGAAGUAU | 2852 | UACUUCAUCAGAUCUUAGGUU | 2990 |
| D-2458; | 2056-2074 | CCUAAGAUCUGAUGAAGUAU | 2852 | UACUUCAUCAGAUCUUAGGUU | 2990 |
| D-2459; | | | | | |
| D-2460 | | | | | |
| D-2495 | 768-788 | UAGCAGACUUGUUCCGACUU | 2853 | AGUCGGAACAAGUCUGCUAUU | 3003 |
| D-2496 | 1455-1475 | CCGUUUAACUGAUUAUGGAU | 2854 | UCCAUAAUCAGUUAAACGGUU | 3009 |
| D-2497 | 1253-1273 | GACAACACUUGAAGCAUGUU | 2855 | ACAUGCUUCAAGUGUUGUCUU | 3010 |
| D-2498 | 2082-2102 | UUGCCAUUUUGUCCUUUGAU | 2856 | UCAAAGGACAAAAUGGCAAUU | 3011 |
| D-2499 | 2050-2070 | UAACUCUAAGAUCUGAUGAU | 2857 | UCAUCAGAUCUUAGAGUUAUU | 3012 |
| D-2500 | 1346-1366 | GUCUCAAUGCUUCAAUGUUU | 2858 | AACAUUGAAGCAUUGAGACUU | 3013 |
| D-2514 | 985-1005 | GUGAUGGCUUGUUCCGGAUG | 2859 | ACAUCCGGAACAAGCCAUCAC | 3014 |
| D-2515 | 985-1005 | GUGAUGGCUUGUUGCAGAUG | 2860 | ACAUCUGCAACAAGCCAUCAC | 3015 |
| D-2516 | 1092-1114 | CAGAACGAAAGUUAUGUGGA | 2861 | UUCCACAUAACUUUCGUUCUGAA | 3016 |
| D-2517 | 1092-1114 | CAGAACGAAAGUUGUAUGGA | 2862 | UUCCAUACAACUUUCGUUCUGAA | 3017 |
| D-2518 | 1210-1230 | UAUGUCCUGGAAUAUAAGAU | 2863 | AAUCUUAUAUUCCAGGACAUAUU | 3018 |
| D-2519 | 1210-1230 | UAUGUCCUGGAAUGUUAGAU | 2864 | AAUCUAACAUUCCAGGACAUAUU | 3019 |
| D-2520 | 1211-1231 | AUGUCCUGGAAUAUUGGAUG | 2865 | ACAUCCAAUAUUCCAGGACAUUU | 3020 |
| D-2521 | 1211-1231 | AUGUCCUGGAAUAAUAGAUG | 2866 | ACAUCUAUUAUUCCAGGACAUUU | 3021 |
| D-2522 | 1212-1232 | UGUCCUGGAAUAUUAAAUGC | 2867 | AGCAUUUAAUAUUCCAGGACAUU | 3022 |
| D-2523 | 1212-1232 | UGUCCUGGAAUAUAAGAUGC | 2868 | AGCAUCUUAUAUUCCAGGACAUU | 3023 |
| D-2524 | 1215-1233 | CCUGGAAUAUUAGGUGCCUU | 2869 | AGGCACCUAAUAUUCCAGGUU | 3024 |
| D-2529 | 1215-1235 | CCUGGAAUAUUAGGUGCCUU | 2869 | AAAGGCACCUAAUAUUCCAGGUU | 3029 |
| D-2525 | 1215-1233 | CCUGGAAUAUUGGAUGCCUU | 2870 | AGGCAUCCAAUAUUCCAGGUU | 3025 |
| D-2526 | 1214-1234 | UCCUGGAAUAUUAGAAGCCU | 2871 | AAGGCUUCUAAUAUUCCAGGA | 3026 |
| D-2527 | 1214-1234 | UCCUGGAAUAUUAAAUGCCU | 2872 | AAGGCAUUUAAUAUUCCAGGA | 3027 |
| D-2528 | 1215-1235 | CCUGGAAUAUUAGAUACCUU | 2873 | AAAGGUAUCUAAUAUUCCAGGUU | 3028 |
| D-2530 | 1216-1236 | CUGGAAUAUUAGAUGGCUUU | 2874 | AAAAGCCAUCUAAUAUUCCAGUU | 3030 |
| D-2531 | 1216-1236 | CUGGAAUAUUAGAAGCCUUU | 2875 | AAAAGGCUUCUAAUAUUCCAGUU | 3031 |
| D-2532 | 1219-1239 | GAAUAUUAGAUGCCUAUUAA | 2876 | UUUAAUAGGCAUCUAAUAUUCUU | 3032 |
| D-2533 | 1219-1239 | GAAUAUUAGAUGCGUUUUAA | 2877 | UUUAAAACGCAUCUAAUAUUCUU | 3033 |
| D-2534 | 1227-1247 | GAUGCCUUUUAAAAAAGUUC | 2878 | AGAACUUUUUUAAAAGGCAUCUU | 3034 |
| D-2535 | 1227-1247 | GAUGCCUUUUAAAGAUGUUC | 2879 | AGAACAUCUUUAAAAGGCAUCUU | 3035 |
| D-2536 | 1314-1334 | GAUUUUCACAUUUUUGGUCU | 2880 | AAGACCAAAAAUGUGAAAAUCUU | 3036 |
| D-2537 | 1314-1334 | GAUUUUCACAUUUAUCGUCU | 2881 | AAGACGAUAAAUGUGAAAAUCUU | 3037 |
| D-2538 | 1350-1370 | CUCAAUGCUUCAAUGACCCA | 2882 | AUGGGUCAUUGAAGCAUUGAGUU | 3038 |
| D-2539 | 1350-1370 | CUCAAUGCUUCAAAGUCCCA | 2883 | AUGGGACUUUGAAGCAUUGAGUU | 3039 |
| D-2540 | 1352-1372 | CAAUGCUUCAAUGUCGCAGU | 2884 | AACUGCGACAUUGAAGCAUUG | 3040 |
| D-2541 | 1352-1372 | CAAUGCUUCAAUGACCCAGU | 2885 | AACUGGGUCAUUGAAGCAUUG | 3041 |
| D-2542 | 1385-1405 | AAAUAUAGUCUCAAUGACUU | 2886 | UAAGUCAUUGAGACUAUAUUUUU | 3042 |
| D-2543 | 1385-1405 | AAAUAUAGUCUCAGUAACUU | 2887 | UAAGUUACUGAGACUAUAUUUUU | 3043 |
| D-2544 | 1438-1458 | GCAGGAUUCUGAAAAGUCCC | 2888 | AGGGACUUUUCAGAAUCCUGCUU | 3044 |
| D-2545 | 1438-1458 | GCAGGAUUCUGAAGACUCCC | 2889 | AGGGAGUCUUCAGAAUCCUGCUU | 3045 |
| D-2546 | 1506-1526 | UACCAAGAGCGCAGAGUUGC | 2890 | UGCAACUCUGCGCUCUUGGUAUU | 3046 |
| D-2547 | 1506-1526 | UACCAAGAGCGCAAACUUGC | 2891 | UGCAAGUUUGCGCUCUUGGUAUU | 3047 |
| D-2548 | 1997-2017 | AGGAAAGCAUAUGUCGGUUG | 2892 | ACAACCGACAUAUGCUUUCCUUU | 3048 |
| D-2549 | 1997-2017 | AGGAAAGCAUAUGACAGUUG | 2893 | ACAACUGUCAUAUGCUUUCCUUU | 3049 |
| D-2550 | 2016-2034 | GUUUAAAACCCAAAAUCUAU | 2894 | UAGAUUUUGGGUUUUAAACUU | 3050 |
| D-2551 | 2016-2034 | GUUUAAAACCCGAUAUCUAU | 2895 | UAGAUAUCGGGUUUUAAACUU | 3051 |
| D-2552 | 2039-2059 | UUAACUGAUUGUAUAGCUCU | 2896 | UAGAGCUAUACAAUCAGUUAAUU | 3052 |
| D-2553 | 2039-2059 | UUAACUGAUUGUAAAACUCU | 2897 | UAGAGUUUUACAAUCAGUUAAUU | 3053 |
| D-2554 | 2052-2072 | UAACUCUAAGAUCUGGUGAA | 2898 | AUUCACCAGAUCUUAGAGUUA | 3054 |
| D-2555 | 2052-2072 | UAACUCUAAGAUCAGAUGAA | 2899 | AUUCAUCUGAUCUUAGAGUUA | 3055 |
| D-2556 | 2054-2074 | ACUCUAAGAUCUGAUAAAGU | 2900 | UACUUUAUCAGAUCUUAGAGUUU | 3056 |
| D-2557 | 2054-2074 | ACUCUAAGAUCUGGUGAAGU | 2901 | UACUUCACCAGAUCUUAGAGUUU | 3057 |
| D-2558 | 2082-2102 | UAUUGCCAUUUUGUCGUUUG | 2902 | UCAAACGACAAAAUGGCAAUAUU | 3058 |
| D-2559 | 2082-2102 | UAUUGCCAUUUUGACCUUUG | 2903 | UCAAAGGUCAAAAUGGCAAUAUU | 3059 |
| D-2560 | 2086-2106 | GCCAUUUUGUCCUUUAAUUA | 2904 | AUAAUUAAAGGACAAAAUGGCUU | 3060 |
| D-2561 | 2086-2106 | GCCAUUUUGUCCUAUGAUUA | 2905 | AUAAUCAUAGGACAAAAUGGCUU | 3061 |

TABLE 2
Modified mARC1 siRNA sequences

| Duplex | | SEQ ID | | SEQ ID |
|---|---|---|---|---|
| No. | Sense Sequence (5′-3′) | NO: | Antisense Sequence (5′-3′) | NO: |
| D-1000 | [GalNAc3]sgagcaaGfcAfCfUfAfuauggaaus{invAb} | 1340 | usUfsccauAfuaguGfcUfugcucsgsu | 2072 |
| D-1001 | [GalNAc3]sagaaguUfcUfCfGfGfcaaaugaus{invAb} | 1341 | usCfsauuuGfccgaGfaAfcuucusgsu | 2073 |
| D-1002 | [GalNAc3]sgagcaaGfcUfGfAfAfuuuggaaus{invAb} | 1342 | usUfsccaaAfuucaGfcUfugcucsgsu | 2074 |
| D-1003 | [GalNAc3]sagaaguUfcAfGfCfGfcuaaugaus{invAb} | 1343 | usCfsauuaGfcgcuGfaAfcuucusgsu | 2075 |
| D-1004 | gsasaggaCfgCfAfCfUfgcucugaus{invAb} | 1344 | asAfsuCfaGfagcagugCfgUfccuucsusu | 2076 |
| D-1005 | asgsgacgCfaCfUfGfCfucugauugs{invAb} | 1345 | asCfsaAfuCfagagcagUfgCfguccususu | 2077 |
| D-1006 | gsgsacgcAfcUfGfCfUfcugauuggs{invAb} | 1346 | asCfscAfaUfcagagcaGfuGfcguccsusu | 2078 |
| D-1007 | ascsgcacUfgCfUfCfUfgauuggccs{invAb} | 1347 | asGfsgCfcAfaucagagCfaGfugcgususu | 2079 |
| D-1008 | csusgcucUfgAfUfUfGfgcccggaas{invAb} | 1348 | asUfsuCfcGfggccaauCfaGfagcagsusu | 2080 |
| D-1009 | usgscucuGfaUfUfGfGfcccggaags{invAb} | 1349 | asCfsuUfcCfgggccaaUfcAfgagcasusu | 2081 |
| D-1010 | gscsucugAfuUfGfGfCfccggaaggs{invAb} | 1350 | asCfscUfuCfcgggccaAfuCfagagcsusu | 2082 |
| D-1011 | csgsgggcCfaAfAfGfGfccgcaccus{invAb} | 1351 | asAfsgGfuGfcggccuuUfgGfccccgsusu | 2083 |
| D-1012 | gsgsggccAfaAfGfGfCfcgcaccuus{invAb} | 1352 | asAfsaGfgUfgcggccuUfuGfgccccsusu | 2084 |
| D-1013 | gscscaaaGfgCfCfGfCfaccuucccs{invAb} | 1353 | asGfsgGfaAfggugcggCfcUfuuggcsusu | 2085 |
| D-1014 | cscsaaagGfcCfGfCfAfccuuccccs{invAb} | 1354 | asGfsgGfgAfaggugcgGfcCfuuuggsusu | 2086 |
| D-1015 | csgsccacCfuCfGfCfGfgagaagccs{invAb} | 1355 | usGfsgCfuUfcuccgcgAfgGfuggcgsusu | 2087 |
| D-1016 | gscscaccUfcGfCfGfGfagaagccas{invAb} | 1356 | asUfsgGfcUfucuccgcGfaGfguggcsusu | 2088 |
| D-1017 | cscsaccuCfgCfGfGfAfgaagccags{invAb} | 1357 | asCfsuGfgCfuucuccgCfgAfgguggsusu | 2089 |
| D-1018 | ascscucgCfgGfAfGfAfagccagccs{invAb} | 1358 | usGfsgCfuGfgcuucucCfgCfgaggususu | 2090 |
| D-1019 | usgsaucaAfcCfAfGfGfagggaaacs{invAb} | 1359 | usGfsuUfuCfccuccugGfuUfgaucasusu | 2091 |
| D-1020 | asuscaacCfaGfGfAfGfggaaacaus{invAb} | 1360 | asAfsuGfuUfucccuccUfgGfuugaususu | 2092 |
| D-1021 | uscsaaccAfgGfAfGfGfgaaacaugs{invAb} | 1361 | asCfsaUfgUfuucccucCfuGfguugasusu | 2093 |
| D-1022 | csasaccaGfgAfGfGfGfaaacauggs{invAb} | 1362 | asCfscAfuGfuuucccuCfcUfgguugsusu | 2094 |
| D-1023 | asasccagGfaGfGfGfAfaacauggus{invAb} | 1363 | asAfscCfaUfguuucccUfcCfugguususu | 2095 |
| D-1024 | ascscaggAfgGfGfAfAfacaugguus{invAb} | 1364 | usAfsaCfcAfuguuuccCfuCfcuggususu | 2096 |
| D-1025 | usgscucgCfcAfGfGfAfaccucgccs{invAb} | 1365 | asGfsgCfgAfgguuccuGfgCfgagcasusu | 2097 |
| D-1026 | csuscgccAfgGfAfAfCfcucgccugs{invAb} | 1366 | asCfsaGfgCfgagguucCfuGfgcgagsusu | 2098 |
| D-1027 | gsgsaaccUfcGfCfCfUfgguccugas{invAb} | 1367 | asUfscAfgGfaccaggcGfaGfguuccsusu | 2099 |
| D-1028 | asasccucGfcCfUfGfGfuccugauus{invAb} | 1368 | asAfsaUfcAfggaccagGfcGfagguususu | 2100 |
| D-1029 | ascscucgCfcUfGfGfUfccugauuus{invAb} | 1369 | asAfsaAfuCfaggaccaGfgCfgaggususu | 2101 |
| D-1030 | cscsucgcCfuGfGfUfCfcugauuucs{invAb} | 1370 | asGfsaAfaUfcaggaccAfgGfcgaggsusu | 2102 |
| D-1031 | csuscgccUfgGfUfCfCfugauuuccs{invAb} | 1371 | asGfsgAfaAfucaggacCfaGfgcgagsusu | 2103 |
| D-1032 | cscsugguCfcUfGfAfUfuucccugas{invAb} | 1372 | asUfscAfgGfgaaaucaGfgAfccaggsusu | 2104 |
| D-1033 | gsascucuCfaGfUfGfCfagccuacas{invAb} | 1373 | asUfsgUfaGfgcugcacUfgAfgagucsusu | 2105 |
| D-1034 | csuscucaGfuGfCfAfGfccuacacas{invAb} | 1374 | usUfsgUfgUfaggcugcAfcUfgagagsusu | 2106 |
| D-1035 | uscsucagUfgCfAfGfCfcuacacaas{invAb} | 1375 | usUfsuGfuGfuaggcugCfaCfugagasusu | 2107 |
| D-1036 | csuscaguGfcAfGfCfCfuacacaaas{invAb} | 1376 | asUfsuUfgUfguaggcuGfcAfcugagsusu | 2108 |
| D-1037 | uscsagugCfaGfCfCfUfacacaaags{invAb} | 1377 | asCfsuUfuGfuguaggcUfgCfacugasusu | 2109 |
| D-1038 | csusaucaAfaAfCfGfCfccaccacas{invAb} | 1378 | usUfsgUfgGfugggcguUfuUfgauagsusu | 2110 |
| D-1039 | usasucaaAfaCfGfCfCfcaccacaas{invAb} | 1379 | usUfsuGfuGfgugggcgUfuUfugauasusu | 2111 |
| D-1040 | asuscaaaAfcGfCfCfCfaccacaaas{invAb} | 1380 | asUfsuUfgUfggugggcGfuUfuugaususu | 2112 |
| D-1041 | uscsaaaaCfgCfCfCfAfccacaaaus{invAb} | 1381 | asAfsuUfuGfuggugggCfgUfuuugasusu | 2113 |
| D-1042 | asasacgcCfcAfCfCfAfcaaaugcas{invAb} | 1382 | asUfsgCfaUfuugugguGfgGfcguuususu | 2114 |
| D-1043 | asascgccCfaCfCfAfCfaaaugcags{invAb} | 1383 | asCfsuGfcAfuuuguggUfgGfgcguususu | 2115 |
| D-1044 | cscsagugGfaUfAfAfCfcagcuuccs{invAb} | 1384 | asGfsgAfaGfcugguuaUfcCfacuggsusu | 2116 |
| D-1045 | csasguggAfuAfAfCfCfagcuuccus{invAb} | 1385 | asAfsgGfaAfgcugguuAfuCfcacugsusu | 2117 |
| D-1046 | gsusggauAfaCfCfAfGfcuuccugas{invAb} | 1386 | usUfscAfgGfaagcuggUfuAfuccacsusu | 2118 |
| D-1047 | gsasuaacCfaGfCfUfUfccugaagus{invAb} | 1387 | asAfscUfuCfaggaagcUfgGfuuaucsusu | 2119 |
| D-1048 | asuscaaaUfaGfCfAfGfacuuguucs{invAb} | 1388 | asGfsaAfcAfagucugcUfaUfuugaususu | 2120 |
| D-1049 | csasaauaGfcAfGfAfCfuuguuccgs{invAb} | 1389 | usCfsgGfaAfcaagucuGfcUfauuugsusu | 2121 |
| D-1050 | asasauagCfaGfAfCfUfuguuccgas{invAb} | 1390 | asUfscGfgAfacaagucUfgCfuauuususu | 2122 |
| D-1051 | usgsagcuUfcUfUfAfUfuggugacgs{invAb} | 1391 | asCfsgUfcAfccaauaaGfaAfgcucasusu | 2123 |
| D-1052 | asgscuucUfuAfUfUfGfgugacgugs{invAb} | 1392 | asCfsaCfgUfcaccaauAfaGfaagcususu | 2124 |
| D-1053 | gscsuucuUfaUfUfGfGfugacguggs{invAb} | 1393 | usCfscAfcGfucaccaaUfaAfgaagcsusu | 2125 |
| D-1054 | ususcuuaUfuGfGfUfGfacguggaas{invAb} | 1394 | asUfsuCfcAfcgucaccAfaUfaagaasusu | 2126 |
| D-1055 | ususggugAfcGfUfGfGfaacugaaas{invAb} | 1395 | usUfsuUfcAfguuccacGfuCfaccaasusu | 2127 |
| D-1056 | usgsgugaCfgUfGfGfAfacugaaaas{invAb} | 1396 | asUfsuUfuCfaguuccaCfgUfcaccasusu | 2128 |
| D-1057 | gsgsugacGfuGfGfAfAfcugaaaags{invAb} | 1397 | asCfsuUfuUfcaguuccAfcGfucaccsusu | 2129 |
| D-1058 | gsusgacgUfgGfAfAfCfugaaaaggs{invAb} | 1398 | asCfscUfuUfucaguucCfaCfgucacsusu | 2130 |
| D-1059 | gscsuuguUfcCfAfGfAfugcauuuus{invAb} | 1399 | usAfsaAfaUfgcaucugGfaAfcaagcsusu | 2131 |
| D-1060 | gsusuccaGfaUfGfCfAfuuuuaaccs{invAb} | 1400 | usGfsgUfuAfaaaugcaUfcUfggaacsusu | 2132 |
| D-1061 | ususccagAfuGfCfAfUfuuuaaccas{invAb} | 1401 | asUfsgGfuUfaaaaugcAfuCfuggaasusu | 2133 |
| D-1062 | usgscauuUfuAfAfCfCfacaguggas{invAb} | 1402 | asUfscCfaCfugugguuAfaAfaugcasusu | 2134 |
| D-1063 | gscsauuuUfaAfCfCfAfcaguggacs{invAb} | 1403 | asGfsuCfcAfcugugguUfaAfaaugcsusu | 2135 |
| D-1064 | gsgsugucAfuGfAfGfCfaggaaggas{invAb} | 1404 | usUfscCfuUfccugcucAfuGfacaccsusu | 2136 |
| D-1065 | gsasaccgCfuGfGfAfAfacacugaas{invAb} | 1405 | asUfsuCfaGfuguuuccAfgCfgguucsusu | 2137 |
| D-1066 | gscsuggaAfaCfAfCfUfgaagaguus{invAb} | 1406 | usAfsaCfuCfuucagugUfuUfccagcsusu | 2138 |
| D-1067 | gsgsaaacAfcUfGfAfAfgaguuaucs{invAb} | 1407 | asGfsaUfaAfcucuucaGfuGfuuuccsusu | 2139 |
| D-1068 | gsasaacaCfuGfAfAfGfaguuaucgs{invAb} | 1408 | asCfsgAfuAfacucuucAfgUfguuucsusu | 2140 |
| D-1069 | asasacacUfgAfAfGfAfguuaucgcs{invAb} | 1409 | asGfscGfaUfaacucuuCfaGfuguuususu | 2141 |
| D-1070 | asascacuGfaAfGfAfGfuuaucgccs{invAb} | 1410 | usGfsgCfgAfuaacucuUfcAfguguususu | 2142 |
| D-1071 | ascsacugAfaGfAfGfUfuaucgccas{invAb} | 1411 | asUfsgGfcGfauaacucUfuCfagugususu | 2143 |
| D-1072 | csascugaAfgAfGfUfUfaucgccags{invAb} | 1412 | asCfsuGfgCfgauaacuCfuUfcagugsusu | 2144 |
| D-1073 | ascsugaaGfaGfUfUfAfucgccagus{invAb} | 1413 | asAfscUfgGfcgauaacUfcUfucagususu | 2145 |
| D-1074 | csusgaagAfgUfUfAfUfcgccagugs{invAb} | 1414 | asCfsaCfuGfgcgauaaCfuCfuucagsusu | 2146 |
| D-1075 | usgsaagaGfuUfAfUfCfgccagugus{invAb} | 1415 | asAfscAfcUfggcgauaAfcUfcuucasusu | 2147 |
| D-1076 | gsasagagUfuAfUfCfGfccagugugs{invAb} | 1416 | usCfsaCfaCfuggcgauAfaCfucuucsusu | 2148 |
| D-1077 | gsasguuaUfcGfCfCfAfgugugaccs{invAb} | 1417 | asGfsgUfcAfcacuggcGfaUfaacucsusu | 2149 |
| D-1078 | asgsuuauCfgCfCfAfGfugugacccs{invAb} | 1418 | asGfsgGfuCfacacuggCfgAfuaacususu | 2150 |
| D-1079 | gsusuaucGfcCfAfGfUfgugacccus{invAb} | 1419 | asAfsgGfgUfcacacugGfcGfauaacsusu | 2151 |
| D-1080 | ususaucgCfcAfGfUfGfugacccuus{invAb} | 1420 | asAfsaGfgGfucacacuGfgCfgauaasusu | 2152 |
| D-1081 | csgsccagUfgUfGfAfCfccuucagas{invAb} | 1421 | usUfscUfgAfagggucaCfaCfuggcgsusu | 2153 |
| D-1082 | gscscaguGfuGfAfCfCfcuucagaas{invAb} | 1422 | asUfsuCfuGfaagggucAfcAfcuggcsusu | 2154 |
| D-1083 | csasguguGfaCfCfCfUfucagaacgs{invAb} | 1423 | usCfsgUfuCfugaagggUfcAfcacugsusu | 2155 |
| D-1084 | asgsugugAfcCfCfUfUfcagaacgas{invAb} | 1424 | usUfscGfuUfcugaaggGfuCfacacususu | 2156 |
| D-1085 | gsusgugaCfcCfUfUfCfagaacgaas{invAb} | 1425 | usUfsuCfgUfucugaagGfgUfcacacsusu | 2157 |
| D-1086 | usgsugacCfcUfUfCfAfgaacgaaas{invAb} | 1426 | asUfsuUfcGfuucugaaGfgGfucacasusu | 2158 |
| D-1087 | gsusgaccCfuUfCfAfGfaacgaaags{invAb} | 1427 | asCfsuUfuCfguucugaAfgGfgucacsusu | 2159 |
| D-1088 | usgsacccUfuCfAfGfAfacgaaagus{invAb} | 1428 | asAfscUfuUfcguucugAfaGfggucasusu | 2160 |
| D-1089 | gsascccuUfcAfGfAfAfcgaaaguus{invAb} | 1429 | usAfsaCfuUfucguucuGfaAfgggucsusu | 2161 |
| D-1090 | ascsccuuCfaGfAfAfCfgaaaguuas{invAb} | 1430 | asUfsaAfcUfuucguucUfgAfagggususu | 2162 |
| D-1091 | cscscuucAfgAfAfCfGfaaaguuaus{invAb} | 1431 | usAfsuAfaCfuuucguuCfuGfaagggsusu | 2163 |
| D-1092 | cscsuucaGfaAfCfGfAfaaguuauas{invAb} | 1432 | asUfsaUfaAfcuuucguUfcUfgaaggsusu | 2164 |
| D-1093 | csusucagAfaCfGfAfAfaguuauaus{invAb} | 1433 | asAfsuAfuAfacuuucgUfuCfugaagsusu | 2165 |
| D-1094 | ususcagaAfcGfAfAfAfguuauaugs{invAb} | 1434 | asCfsaUfaUfaacuuucGfuUfcugaasusu | 2166 |
| D-1095 | uscsagaaCfgAfAfAfGfuuauauggs{invAb} | 1435 | usCfscAfuAfuaacuuuCfgUfucugasusu | 2167 |
| D-1096 | csasgaacGfaAfAfGfUfuauauggas{invAb} | 1436 | usUfscCfaUfauaacuuUfcGfuucugsusu | 2168 |
| D-1097 | asgsuuauAfuGfGfAfAfaaucaccas{invAb} | 1437 | asUfsgGfuGfauuuuccAfuAfuaacususu | 2169 |
| D-1098 | ususauauGfgAfAfAfAfucaccacus{invAb} | 1438 | asAfsgUfgGfugauuuuCfcAfuauaasusu | 2170 |
| D-1099 | asasuagcAfgAfCfUfUfguuccgacs{invAb} | 1439 | asGfsuCfgGfaacaaguCfuGfcuauususu | 2171 |
| D-1100 | asusagcaGfaCfUfUfGfuuccgaccs{invAb} | 1440 | asGfsgUfcGfgaacaagUfcUfgcuaususu | 2172 |
| D-1101 | usasgcagAfcUfUfGfUfuccgacccs{invAb} | 1441 | usGfsgGfuCfggaacaaGfuCfugcuasusu | 2173 |
| D-1102 | asgscagaCfuUfGfUfUfccgacccas{invAb} | 1442 | usUfsgGfgUfcggaacaAfgUfcugcususu | 2174 |
| D-1103 | gscsagacUfuGfUfUfCfcgacccaas{invAb} | 1443 | asUfsuGfgGfucggaacAfaGfucugcsusu | 2175 |
| D-1104 | csasgacuUfgUfUfCfCfgacccaags{invAb} | 1444 | asCfsuUfgGfgucggaaCfaAfgucugsusu | 2176 |
| D-1105 | asgsacuuGfuUfCfCfGfacccaaggs{invAb} | 1445 | usCfscUfuGfggucggaAfcAfagucususu | 2177 |
| D-1106 | gsascuugUfuCfCfGfAfcccaaggas{invAb} | 1446 | asUfscCfuUfgggucggAfaCfaagucsusu | 2178 |
| D-1107 | ascsuuguUfcCfGfAfCfccaaggacs{invAb} | 1447 | asGfsuCfcUfugggucgGfaAfcaagususu | 2179 |
| D-1108 | csusuguuCfcGfAfCfCfcaaggaccs{invAb} | 1448 | usGfsgUfcCfuugggucGfgAfacaagsusu | 2180 |
| D-1109 | ususccgaCfcCfAfAfGfgaccagaus{invAb} | 1449 | asAfsuCfuGfguccuugGfgUfcggaasusu | 2181 |
| D-1110 | asasggacCfaGfAfUfUfgcuuacucs{invAb} | 1450 | usGfsaGfuAfagcaaucUfgGfuccuususu | 2182 |
| D-1111 | gsasccagAfuUfGfCfUfuacucagas{invAb} | 1451 | asUfscUfgAfguaagcaAfuCfuggucsusu | 2183 |
| D-1112 | cscsagauUfgCfUfUfAfcucagacas{invAb} | 1452 | asUfsgUfcUfgaguaagCfaAfucuggsusu | 2184 |
| D-1113 | csasgauuGfcUfUfAfCfucagacacs{invAb} | 1453 | asGfsuGfuCfugaguaaGfcAfaucugsusu | 2185 |
| D-1114 | asgsauugCfuUfAfCfUfcagacaccs{invAb} | 1454 | usGfsgUfgUfcugaguaAfgCfaaucususu | 2186 |
| D-1115 | gsasuugcUfuAfCfUfCfagacaccas{invAb} | 1455 | asUfsgGfuGfucugaguAfaGfcaaucsusu | 2187 |
| D-1116 | asusugcuUfaCfUfCfAfgacaccags{invAb} | 1456 | asCfsuGfgUfgucugagUfaAfgcaaususu | 2188 |
| D-1117 | gscsuuacUfcAfGfAfCfaccagcccs{invAb} | 1457 | usGfsgGfcUfggugucuGfaGfuaagcsusu | 2189 |
| D-1118 | ususacucAfgAfCfAfCfcagcccaus{invAb} | 1458 | asAfsuGfgGfcugguguCfuGfaguaasusu | 2190 |
| D-1119 | csgsgaucUfcAfAfCfUfccaggcuas{invAb} | 1459 | asUfsaGfcCfuggaguuGfaGfauccgsusu | 2191 |
| D-1120 | gsgsaucuCfaAfCfUfCfcaggcuags{invAb} | 1460 | usCfsuAfgCfcuggaguUfgAfgauccsusu | 2192 |
| D-1121 | gsasucucAfaCfUfCfCfaggcuagas{invAb} | 1461 | asUfscUfaGfccuggagUfuGfagaucsusu | 2193 |
| D-1122 | asuscucaAfcUfCfCfAfggcuagags{invAb} | 1462 | usCfsuCfuAfgccuggaGfuUfgagaususu | 2194 |
| D-1123 | asascuccAfgGfCfUfAfgagaagaas{invAb} | 1463 | usUfsuCfuUfcucuagcCfuGfgaguususu | 2195 |
| D-1124 | asgsaagaAfaGfUfUfAfaagcaaccs{invAb} | 1464 | usGfsgUfuGfcuuuaacUfuUfcuucususu | 2196 |
| D-1125 | gsasagaaAfgUfUfAfAfagcaaccas{invAb} | 1465 | usUfsgGfuUfgcuuuaaCfuUfucuucsusu | 2197 |
| D-1126 | asasgaaaGfuUfAfAfAfgcaaccaas{invAb} | 1466 | asUfsuGfgUfugcuuuaAfcUfuucuususu | 2198 |
| D-1127 | asgsaaagUfuAfAfAfGfcaaccaacs{invAb} | 1467 | asGfsuUfgGfuugcuuuAfaCfuuucususu | 2199 |
| D-1128 | gsasaaguUfaAfAfGfCfaaccaacus{invAb} | 1468 | asAfsgUfuGfguugcuuUfaAfcuuucsusu | 2200 |
| D-1129 | asasaguuAfaAfGfCfAfaccaacuus{invAb} | 1469 | asAfsaGfuUfgguugcuUfuAfacuuususu | 2201 |
| D-1130 | asasguuaAfaGfCfAfAfccaacuucs{invAb} | 1470 | usGfsaAfgUfugguugcUfuUfaacuususu | 2202 |
| D-1131 | asgsuuaaAfgCfAfAfCfcaacuucas{invAb} | 1471 | asUfsgAfaGfuugguugCfuUfuaacususu | 2203 |
| D-1132 | gsusuaaaGfcAfAfCfCfaacuucags{invAb} | 1472 | asCfsuGfaAfguugguuGfcUfuuaacsusu | 2204 |
| D-1133 | asasagcaAfcCfAfAfCfuucaggccs{invAb} | 1473 | asGfsgCfcUfgaaguugGfuUfgcuuususu | 2205 |
| D-1134 | asgscaacCfaAfCfUfUfcaggcccas{invAb} | 1474 | usUfsgGfgCfcugaaguUfgGfuugcususu | 2206 |
| D-1135 | csasaccaAfcUfUfCfAfggcccaaus{invAb} | 1475 | usAfsuUfgGfgccugaaGfuUfgguugsusu | 2207 |
| D-1136 | asasccaaCfuUfCfAfGfgcccaauas{invAb} | 1476 | asUfsaUfuGfggccugaAfgUfugguususu | 2208 |
| D-1137 | cscsaacuUfcAfGfGfCfccaauauus{invAb} | 1477 | asAfsaUfaUfugggccuGfaAfguuggsusu | 2209 |
| D-1138 | csasacuuCfaGfGfCfCfcaauauugs{invAb} | 1478 | asCfsaAfuAfuugggccUfgAfaguugsusu | 2210 |
| D-1139 | ascsuucaGfgCfCfCfAfauauuguas{invAb} | 1479 | usUfsaCfaAfuauugggCfcUfgaagususu | 2211 |
| D-1140 | csusucagGfcCfCfAfAfuauuguaas{invAb} | 1480 | asUfsuAfcAfauauuggGfcCfugaagsusu | 2212 |
| D-1141 | ususcaggCfcCfAfAfUfauuguaaus{invAb} | 1481 | asAfsuUfaCfaauauugGfgCfcugaasusu | 2213 |
| D-1142 | uscsaggcCfcAfAfUfAfuuguaauus{invAb} | 1482 | asAfsaUfuAfcaauauuGfgGfccugasusu | 2214 |
| D-1143 | asgsgcccAfaUfAfUfUfguaauuucs{invAb} | 1483 | usGfsaAfaUfuacaauaUfuGfggccususu | 2215 |
| D-1144 | gsgscccaAfuAfUfUfGfuaauuucas{invAb} | 1484 | asUfsgAfaAfuuacaauAfuUfgggccsusu | 2216 |
| D-1145 | gsasugagCfuUfCfUfUfauuggugas{invAb} | 1485 | asUfscAfcCfaauaagaAfgCfucaucsusu | 2217 |
| D-1146 | asusgagcUfuCfUfUfAfuuggugacs{invAb} | 1486 | asGfsuCfaCfcaauaagAfaGfcucaususu | 2218 |
| D-1147 | asusauggAfaAfAfUfCfaccacucus{invAb} | 1487 | asAfsgAfgUfggugauuUfuCfcauaususu | 2219 |
| D-1148 | usasuggaAfaAfUfCfAfccacucuus{invAb} | 1488 | asAfsaGfaGfuggugauUfuUfccauasusu | 2220 |
| D-1149 | asusggaaAfaUfCfAfCfcacucuuus{invAb} | 1489 | asAfsaAfgAfguggugaUfuUfuccaususu | 2221 |
| D-1150 | usgsgaaaAfuCfAfCfCfacucuuugs{invAb} | 1490 | asCfsaAfaGfaguggugAfuUfuuccasusu | 2222 |
| D-1151 | csusggaaAfaCfCfCfAfgggaccaus{invAb} | 1491 | asAfsuGfgUfcccugggUfuUfuccagsusu | 2223 |
| D-1152 | gsgsaaaaCfcCfAfGfGfgaccaucas{invAb} | 1492 | usUfsgAfuGfgucccugGfgUfuuuccsusu | 2224 |
| D-1153 | gsasaaacCfcAfGfGfGfaccaucaas{invAb} | 1493 | usUfsuGfaUfggucccuGfgGfuuuucsusu | 2225 |
| D-1154 | cscscaggGfaCfCfAfUfcaaaguggs{invAb} | 1494 | asCfscAfcUfuugauggUfcCfcugggsusu | 2226 |
| D-1155 | cscsagggAfcCfAfUfCfaaagugggs{invAb} | 1495 | usCfscCfaCfuuugaugGfuCfccuggsusu | 2227 |
| D-1156 | gsgsgaccAfuCfAfAfAfgugggagas{invAb} | 1496 | asUfscUfcCfcacuuugAfuGfgucccsusu | 2228 |
| D-1157 | gsgsgagaCfcCfUfGfUfguaccugcs{invAb} | 1497 | asGfscAfgGfuacacagGfgUfcucccsusu | 2229 |
| D-1158 | gsusaccuGfcUfGfGfGfccaguaaus{invAb} | 1498 | asAfsuUfaCfuggcccaGfcAfgguacsusu | 2230 |
| D-1159 | usgscuggGfcCfAfGfUfaaugggaas{invAb} | 1499 | asUfsuCfcCfauuacugGfcCfcagcasusu | 2231 |
| D-1160 | asasauguUfcUfCfAfAfaaaugacas{invAb} | 1500 | usUfsgUfcAfuuuuugaGfaAfcauuususu | 2232 |
| D-1161 | asasuguuCfuCfAfAfAfaaugacaas{invAb} | 1501 | asUfsuGfuCfauuuuugAfgAfacauususu | 2233 |
| D-1162 | asasaaugAfcAfAfCfAfcuugaagcs{invAb} | 1502 | usGfscUfuCfaaguguuGfuCfauuuususu | 2234 |
| D-1163 | asasaugaCfaAfCfAfCfuugaagcas{invAb} | 1503 | asUfsgCfuUfcaaguguUfgUfcauuususu | 2235 |
| D-1164 | asasugacAfaCfAfCfUfugaagcaus{invAb} | 1504 | asAfsuGfcUfucaagugUfuGfucauususu | 2236 |
| D-1165 | usgsacaaCfaCfUfUfGfaagcauggs{invAb} | 1505 | asCfscAfuGfcuucaagUfgUfugucasusu | 2237 |
| D-1166 | gsascaacAfcUfUfGfAfagcauggus{invAb} | 1506 | asAfscCfaUfgcuucaaGfuGfuugucsusu | 2238 |
| D-1167 | ascsaacaCfuUfGfAfAfgcauggugs{invAb} | 1507 | asCfsaCfcAfugcuucaAfgUfguugususu | 2239 |
| D-1168 | csascuugAfaGfCfAfUfgguguuucs{invAb} | 1508 | usGfsaAfaCfaccaugcUfuCfaagugsusu | 2240 |
| D-1169 | csusugaaGfcAfUfGfGfuguuucags{invAb} | 1509 | usCfsuGfaAfacaccauGfcUfucaagsusu | 2241 |
| D-1170 | csusggugUfcUfCfAfAfugcuucaas{invAb} | 1510 | asUfsuGfaAfgcauugaGfaCfaccagsusu | 2242 |
| D-1171 | usgsguguCfuCfAfAfUfgcuucaaus{invAb} | 1511 | asAfsuUfgAfagcauugAfgAfcaccasusu | 2243 |
| D-1172 | gsgsugucUfcAfAfUfGfcuucaaugs{invAb} | 1512 | asCfsaUfuGfaagcauuGfaGfacaccsusu | 2244 |
| D-1173 | gsusgucuCfaAfUfGfCfuucaaugus{invAb} | 1513 | asAfscAfuUfgaagcauUfgAfgacacsusu | 2245 |
| D-1174 | usgsucucAfaUfGfCfUfucaaugucs{invAb} | 1514 | asGfsaCfaUfugaagcaUfuGfagacasusu | 2246 |
| D-1175 | uscsucaaUfgCfUfUfCfaaugucccs{invAb} | 1515 | usGfsgGfaCfauugaagCfaUfugagasusu | 2247 |
| D-1176 | csuscaauGfcUfUfCfAfaugucccas{invAb} | 1516 | asUfsgGfgAfcauugaaGfcAfuugagsusu | 2248 |
| D-1177 | csasaugcUfuCfAfAfUfgucccagus{invAb} | 1517 | asAfscUfgGfgacauugAfaGfcauugsusu | 2249 |
| D-1178 | asusgcuuCfaAfUfGfUfcccagugcs{invAb} | 1518 | usGfscAfcUfgggacauUfgAfagcaususu | 2250 |
| D-1179 | usgscuucAfaUfGfUfCfccagugcas{invAb} | 1519 | usUfsgCfaCfugggacaUfuGfaagcasusu | 2251 |
| D-1180 | asasugacAfaGfAfCfAfggauucugs{invAb} | 1520 | usCfsaGfaAfuccugucUfuGfucauususu | 2252 |
| D-1181 | asusgacaAfgAfCfAfGfgauucugas{invAb} | 1521 | usUfscAfgAfauccuguCfuUfgucaususu | 2253 |
| D-1182 | gsascaagAfcAfGfGfAfuucugaaas{invAb} | 1522 | usUfsuUfcAfgaauccuGfuCfuugucsusu | 2254 |
| D-1183 | asasgacaGfgAfUfUfCfugaaaacus{invAb} | 1523 | asAfsgUfuUfucagaauCfcUfgucuususu | 2255 |
| D-1184 | ascsaggaUfuCfUfGfAfaaacucccs{invAb} | 1524 | asGfsgGfaGfuuuucagAfaUfccugususu | 2256 |
| D-1185 | cscscguuUfaAfCfUfGfauuauggas{invAb} | 1525 | usUfscCfaUfaaucaguUfaAfacgggsusu | 2257 |
| D-1186 | ususuaacUfgAfUfUfAfuggaauags{invAb} | 1526 | asCfsuAfuUfccauaauCfaGfuuaaasusu | 2258 |
| D-1187 | ususaacuGfaUfUfAfUfggaauagus{invAb} | 1527 | asAfscUfaUfuccauaaUfcAfguuaasusu | 2259 |
| D-1188 | asascugaUfuAfUfGfGfaauaguucs{invAb} | 1528 | asGfsaAfcUfauuccauAfaUfcaguususu | 2260 |
| D-1189 | ascsugauUfaUfGfGfAfauaguucus{invAb} | 1529 | asAfsgAfaCfuauuccaUfaAfucagususu | 2261 |
| D-1190 | csusgauuAfuGfGfAfAfuaguucuus{invAb} | 1530 | asAfsaGfaAfcuauuccAfuAfaucagsusu | 2262 |
| D-1191 | gsasuuauGfgAfAfUfAfguucuuucs{invAb} | 1531 | asGfsaAfaGfaacuauuCfcAfuaaucsusu | 2263 |
| D-1192 | asusuaugGfaAfUfAfGfuucuuucus{invAb} | 1532 | asAfsgAfaAfgaacuauUfcCfauaaususu | 2264 |
| D-1193 | ususgcauCfcUfGfUfCfacuaccacs{invAb} | 1533 | asGfsuGfgUfagugacaGfgAfugcaasusu | 2265 |
| D-1194 | csasccccAfaAfUfAfUfggcuggaas{invAb} | 1534 | asUfsuCfcAfgccauauUfuGfgggugsusu | 2266 |
| D-1195 | cscsccaaAfuAfUfGfGfcuggaaugs{invAb} | 1535 | asCfsaUfuCfcagccauAfuUfuggggsusu | 2267 |
| D-1196 | csuscaagCfcCfCfGfGfgcuagcuus{invAb} | 1536 | asAfsaGfcUfagcccggGfgCfuugagsusu | 2268 |
| D-1197 | uscsaagcCfcCfGfGfGfcuagcuuus{invAb} | 1537 | asAfsaAfgCfuagcccgGfgGfcuugasusu | 2269 |
| D-1198 | asasgcccCfgGfGfCfUfagcuuuugs{invAb} | 1538 | usCfsaAfaAfgcuagccCfgGfggcuususu | 2270 |
| D-1199 | asgsccccGfgGfCfUfAfgcuuuugas{invAb} | 1539 | usUfscAfaAfagcuagcCfcGfgggcususu | 2271 |
| D-1200 | gscscccgGfgCfUfAfGfcuuuugaas{invAb} | 1540 | usUfsuCfaAfaagcuagCfcCfggggcsusu | 2272 |
| D-1201 | cscscgggCfuAfGfCfUfuuugaaaus{invAb} | 1541 | asAfsuUfuCfaaaagcuAfgCfccgggsusu | 2273 |
| D-1202 | gsgscuagCfuUfUfUfGfaaauggcas{invAb} | 1542 | asUfsgCfcAfuuucaaaAfgCfuagccsusu | 2274 |
| D-1203 | asusaaagAfcUfGfAfGfgugaccuus{invAb} | 1543 | asAfsaGfgUfcaccucaGfuCfuuuaususu | 2275 |
| D-1204 | csusgcagAfuAfUfUfAfauuuuccas{invAb} | 1544 | asUfsgGfaAfaauuaauAfuCfugcagsusu | 2276 |
| D-1205 | gsasuauuAfaUfUfUfUfccauagaus{invAb} | 1545 | asAfsuCfuAfuggaaaaUfuAfauaucsusu | 2277 |
| D-1206 | asusauuaAfuUfUfUfCfcauagaucs{invAb} | 1546 | asGfsaUfcUfauggaaaAfuUfaauaususu | 2278 |
| D-1207 | usasauuuUfcCfAfUfAfgaucuggas{invAb} | 1547 | asUfscCfaGfaucuaugGfaAfaauuasusu | 2279 |
| D-1208 | asasuuuuCfcAfUfAfGfaucuggaus{invAb} | 1548 | asAfsuCfcAfgaucuauGfgAfaaauususu | 2280 |
| D-1209 | asusuuucCfaUfAfGfAfucuggaucs{invAb} | 1549 | asGfsaUfcCfagaucuaUfgGfaaaaususu | 2281 |
| D-1210 | ususuccaUfaGfAfUfCfuggaucugs{invAb} | 1550 | asCfsaGfaUfccagaucUfaUfggaaasusu | 2282 |
| D-1211 | usgscuucUfcAfGfAfCfagcauuggs{invAb} | 1551 | usCfscAfaUfgcugucuGfaGfaagcasusu | 2283 |
| D-1212 | gscsuucuCfaGfAfCfAfgcauuggas{invAb} | 1552 | asUfscCfaAfugcugucUfgAfgaagcsusu | 2284 |
| D-1213 | uscsagacAfgCfAfUfUfggauuuccs{invAb} | 1553 | asGfsgAfaAfuccaaugCfuGfucugasusu | 2285 |
| D-1214 | csasgacaGfcAfUfUfGfgauuuccus{invAb} | 1554 | usAfsgGfaAfauccaauGfcUfgucugsusu | 2286 |
| D-1215 | asgsacagCfaUfUfGfGfauuuccuas{invAb} | 1555 | usUfsaGfgAfaauccaaUfgCfugucususu | 2287 |
| D-1216 | ususccuaAfaGfGfUfGfcucaggags{invAb} | 1556 | asCfsuCfcUfgagcaccUfuUfaggaasusu | 2288 |
| D-1217 | asgsgaccCfcUfGfGfAfuccuugccs{invAb} | 1557 | usGfsgCfaAfggauccaGfgGfguccususu | 2289 |
| D-1218 | cscscuggAfuCfCfUfUfgccauuccs{invAb} | 1558 | asGfsgAfaUfggcaaggAfuCfcagggsusu | 2290 |
| D-1219 | csusggauCfcUfUfGfCfcauuccccs{invAb} | 1559 | asGfsgGfgAfauggcaaGfgAfuccagsusu | 2291 |
| D-1220 | gsgsauccUfuGfCfCfAfuuccccucs{invAb} | 1560 | usGfsaGfgGfgaauggcAfaGfgauccsusu | 2292 |
| D-1221 | gsasuccuUfgCfCfAfUfuccccucas{invAb} | 1561 | asUfsgAfgGfggaauggCfaAfggaucsusu | 2293 |
| D-1222 | cscsuugcCfaUfUfCfCfccucagcus{invAb} | 1562 | usAfsgCfuGfaggggaaUfgGfcaaggsusu | 2294 |
| D-1223 | csusugccAfuUfCfCfCfcucagcuas{invAb} | 1563 | usUfsaGfcUfgaggggaAfuGfgcaagsusu | 2295 |
| D-1224 | gscscauuCfcCfCfUfCfagcuaaugs{invAb} | 1564 | usCfsaUfuAfgcugaggGfgAfauggcsusu | 2296 |
| D-1225 | csasuuccCfcUfCfAfGfcuaaugacs{invAb} | 1565 | asGfsuCfaUfuagcugaGfgGfgaaugsusu | 2297 |
| D-1226 | ascsggagUfgCfUfCfCfuucuccags{invAb} | 1566 | asCfsuGfgAfgaaggagCfaCfuccgususu | 2298 |
| D-1227 | gsasaaacCfuUfUfAfAfagggggaas{invAb} | 1567 | usUfsuCfcCfccuuuaaAfgGfuuuucsusu | 2299 |
| D-1228 | csasuaugUfcAfGfUfUfguuuaaaas{invAb} | 1568 | asUfsuUfuAfaacaacuGfaCfauaugsusu | 2300 |
| D-1229 | uscsaguuGfuUfUfAfAfaacccaaus{invAb} | 1569 | usAfsuUfgGfguuuuaaAfcAfacugasusu | 2301 |
| D-1230 | asgsuuguUfuAfAfAfAfcccaauaus{invAb} | 1570 | asAfsuAfuUfggguuuuAfaAfcaacususu | 2302 |
| D-1231 | asasggacGfcAfCfUfGfcucugauus{invAb} | 1571 | asAfsaUfcAfgagcaguGfcGfuccuususu | 2303 |
| D-1232 | csasagccCfcGfGfGfCfuagcuuuus{invAb} | 1572 | asAfsaAfaGfcuagcccGfgGfgcuugsusu | 2304 |
| D-1233 | cscsccggGfcUfAfGfCfuuuugaaas{invAb} | 1573 | asUfsuUfcAfaaagcuaGfcCfcggggsusu | 2305 |
| D-1234 | gsascugaGfgUfGfAfCfcuucaggas{invAb} | 1574 | usUfscCfuGfaaggucaCfcUfcagucsusu | 2306 |
| D-1235 | usasuuaaUfuUfUfCfCfauagaucus{invAb} | 1575 | asAfsgAfuCfuauggaaAfaUfuaauasusu | 2307 |
| D-1236 | ususuuccAfuAfGfAfUfcuggaucus{invAb} | 1576 | asAfsgAfuCfcagaucuAfuGfgaaaasusu | 2308 |
| D-1237 | ususcucaGfaCfAfGfCfauuggauus{invAb} | 1577 | asAfsaUfcCfaaugcugUfcUfgagaasusu | 2309 |
| D-1238 | ususuccuAfaAfGfGfUfgcucaggas{invAb} | 1578 | asUfscCfuGfagcaccuUfuAfggaaasusu | 2310 |
| D-1239 | cscsuggaUfcCfUfUfGfccauucccs{invAb} | 1579 | asGfsgGfaAfuggcaagGfaUfccaggsusu | 2311 |
| D-1240 | uscscuugCfcAfUfUfCfcccucagcs{invAb} | 1580 | asGfscUfgAfggggaauGfgCfaaggasusu | 2312 |
| D-1241 | cscsauucCfcCfUfCfAfgcuaaugas{invAb} | 1581 | asUfscAfuUfagcugagGfgGfaauggsusu | 2313 |
| D-1242 | asasaaccUfuUfAfAfAfgggggaaas{invAb} | 1582 | usUfsuUfcCfcccuuuaAfaGfguuuususu | 2314 |
| D-1243 | ususguuuAfaAfAfCfCfcaauaucus{invAb} | 1583 | usAfsgAfuAfuuggguuUfuAfaacaasusu | 2315 |
| D-1244 | csuscuaaGfaUfCfUfGfaugaaguas{invAb} | 1584 | asUfsaCfuUfcaucagaUfcUfuagagsusu | 2316 |
| D-1245 | csusaagaUfcUfGfAfUfgaaguauas{invAb} | 1585 | asUfsaUfaCfuucaucaGfaUfcuuagsusu | 2317 |
| D-1246 | usasagauCfuGfAfUfGfaaguauaus{invAb} | 1586 | asAfsuAfuAfcuucaucAfgAfucuuasusu | 2318 |
| D-1247 | asasgaucUfgAfUfGfAfaguauauus{invAb} | 1587 | asAfsaUfaUfacuucauCfaGfaucuususu | 2319 |
| D-1248 | gsasugaaGfuAfUfAfUfuuuuuauus{invAb} | 1588 | asAfsaUfaAfaaaauauAfcUfucaucsusu | 2320 |
| D-1249 | ususuuauUfgCfCfAfUfuuuguccus{invAb} | 1589 | asAfsgGfaCfaaaauggCfaAfuaaaasusu | 2321 |
| D-1250 | ususuauuGfcCfAfUfUfuuguccuus{invAb} | 1590 | asAfsaGfgAfcaaaaugGfcAfauaaasusu | 2322 |
| D-1251 | ususauugCfcAfUfUfUfuguccuuus{invAb} | 1591 | asAfsaAfgGfacaaaauGfgCfaauaasusu | 2323 |
| D-1252 | asusugccAfuUfUfUfGfuccuuugas{invAb} | 1592 | asUfscAfaAfggacaaaAfuGfgcaaususu | 2324 |
| D-1253 | asusauugGfgAfAfGfUfugacuaaas{invAb} | 1593 | asUfsuUfaGfucaacuuCfcCfaauaususu | 2325 |
| D-1254 | usgsggaaGfuUfGfAfCfuaaacuugs{invAb} | 1594 | usCfsaAfgUfuuagucaAfcUfucccasusu | 2326 |
| D-1255 | gsgsgaagUfuGfAfCfUfaaacuugas{invAb} | 1595 | usUfscAfaGfuuuagucAfaCfuucccsusu | 2327 |
| D-1256 | gsgsaaguUfgAfCfUfAfaacuugaas{invAb} | 1596 | usUfsuCfaAfguuuaguCfaAfcuuccsusu | 2328 |
| D-1257 | ascsugugAfaUfAfAfAfuggaagcus{invAb} | 1597 | usAfsgCfuUfccauuuaUfuCfacagususu | 2329 |
| D-1258 | usgsaauaAfaUfGfGfAfagcuacuus{invAb} | 1598 | asAfsaGfuAfgcuuccaUfuUfauucasusu | 2330 |
| D-1259 | usasaaugGfaAfGfCfUfacuuugacs{invAb} | 1599 | asGfsuCfaAfaguagcuUfcCfauuuasusu | 2331 |
| D-1260 | asasauggAfaGfCfUfAfcuuugacus{invAb} | 1600 | usAfsgUfcAfaaguagcUfuCfcauuususu | 2332 |
| D-1261 | asasgcuaCfuUfUfGfAfcuaguuucs{invAb} | 1601 | usGfsaAfaCfuagucaaAfgUfagcuususu | 2333 |
| D-1262 | asgscuacUfuUfGfAfCfuaguuucas{invAb} | 1602 | asUfsgAfaAfcuagucaAfaGfuagcususu | 2334 |
| D-1263 | gsgsagugCfuCfCfUfUfcuccaguus{invAb} | 1603 | asAfsaCfuGfgagaaggAfgCfacuccsusu | 2335 |
| D-1264 | asasccuuUfaAfAfGfGfgggaaaags{invAb} | 1604 | asCfsuUfuUfcccccuuUfaAfagguususu | 2336 |
| D-1265 | ascscuuuAfaAfGfGfGfggaaaaggs{invAb} | 1605 | usCfscUfuUfucccccuUfuAfaaggususu | 2337 |
| D-1266 | usasuugcCfaUfUfUfUfguccuuugs{invAb} | 1606 | usCfsaAfaGfgacaaaaUfgGfcaauasusu | 2338 |
| D-1267 | gsasaguuGfaCfUfAfAfacuugaaas{invAb} | 1607 | usUfsuUfcAfaguuuagUfcAfacuucsusu | 2339 |
| D-1268 | asasguugAfcUfAfAfAfcuugaaaas{invAb} | 1608 | usUfsuUfuCfaaguuuaGfuCfaacuususu | 2340 |
| D-1269 | gscsuacuUfuGfAfCfUfaguuucags{invAb} | 1609 | usCfsuGfaAfacuagucAfaAfguagcsusu | 2341 |
| D-1270 | usgsacucUfcAfGfUfGfcagccuacs{invAb} | 1610 | usGfsuAfgGfcugcacuGfaGfagucasusu | 2342 |
| D-1271 | ascsgcccAfcCfAfCfAfaaugcagus{invAb} | 1611 | asAfscUfgCfauuugugGfuGfggcgususu | 2343 |
| D-1272 | cscscaguGfgAfUfAfAfccagcuucs{invAb} | 1612 | asGfsaAfgCfugguuauCfcAfcugggsusu | 2344 |
| D-1273 | csasucaaAfuAfGfCfAfgacuuguus{invAb} | 1613 | asAfsaCfaAfgucugcuAfuUfugaugsusu | 2345 |
| D-1274 | uscsaaauAfgCfAfGfAfcuuguuccs{invAb} | 1614 | asGfsgAfaCfaagucugCfuAfuuugasusu | 2346 |
| D-1275 | csasggcuAfgAfGfAfAfgaaaguuas{invAb} | 1615 | usUfsaAfcUfuucuucuCfuAfgccugsusu | 2347 |
| D-1276 | asgsgcuaGfaGfAfAfGfaaaguuaas{invAb} | 1616 | usUfsuAfaCfuuucuucUfcUfagccususu | 2348 |
| D-1277 | ascscaacUfuCfAfGfGfcccaauaus{invAb} | 1617 | asAfsuAfuUfgggccugAfaGfuuggususu | 2349 |
| D-1278 | gsasgcuuCfuUfAfUfUfggugacgus{invAb} | 1618 | asAfscGfuCfaccaauaAfgAfagcucsusu | 2350 |
| D-1279 | csusucuuAfuUfGfGfUfgacguggas{invAb} | 1619 | usUfscCfaCfgucaccaAfuAfagaagsusu | 2351 |
| D-1280 | uscsuuauUfgGfUfGfAfcguggaacs{invAb} | 1620 | asGfsuUfcCfacgucacCfaAfuaagasusu | 2352 |
| D-1281 | asusugguGfaCfGfUfGfgaacugaas{invAb} | 1621 | usUfsuCfaGfuuccacgUfcAfccaaususu | 2353 |
| D-1282 | csusuguuCfcAfGfAfUfgcauuuuas{invAb} | 1622 | usUfsaAfaAfugcaucuGfgAfacaagsusu | 2354 |
| D-1283 | usgsuuccAfgAfUfGfCfauuuuaacs{invAb} | 1623 | asGfsuUfaAfaaugcauCfuGfgaacasusu | 2355 |
| D-1284 | csusggaaAfcAfCfUfGfaagaguuas{invAb} | 1624 | asUfsaAfcUfcuucaguGfuUfuccagsusu | 2356 |
| D-1285 | usgsgaaaCfaCfUfGfAfagaguuaus{invAb} | 1625 | asAfsuAfaCfucuucagUfgUfuuccasusu | 2357 |
| D-1286 | asasgaguUfaUfCfGfCfcagugugas{invAb} | 1626 | asUfscAfcAfcuggcgaUfaAfcucuususu | 2358 |
| D-1287 | asgsaguuAfuCfGfCfCfagugugacs{invAb} | 1627 | asGfsuCfaCfacuggcgAfuAfacucususu | 2359 |
| D-1288 | gsusuauaUfgGfAfAfAfaucaccacs{invAb} | 1628 | asGfsuGfgUfgauuuucCfaUfauaacsusu | 2360 |
| D-1289 | gsusgcugGfaAfAfAfCfccagggacs{invAb} | 1629 | asGfsuCfcCfuggguuuUfcCfagcacsusu | 2361 |
| D-1290 | usgscuggAfaAfAfCfCfcagggaccs{invAb} | 1630 | usGfsgUfcCfcuggguuUfuCfcagcasusu | 2362 |
| D-1291 | gscsuggaAfaAfCfCfCfagggaccas{invAb} | 1631 | asUfsgGfuCfccuggguUfuUfccagcsusu | 2363 |
| D-1292 | asasaaccCfaGfGfGfAfccaucaaas{invAb} | 1632 | asUfsuUfgAfuggucccUfgGfguuuususu | 2364 |
| D-1293 | asasacccAfgGfGfAfCfcaucaaags{invAb} | 1633 | asCfsuUfuGfaugguccCfuGfgguuususu | 2365 |
| D-1294 | asascccaGfgGfAfCfCfaucaaagus{invAb} | 1634 | asAfscUfuUfgauggucCfcUfggguususu | 2366 |
| D-1295 | ascsccagGfgAfCfCfAfucaaagugs{invAb} | 1635 | asCfsaCfuUfugaugguCfcCfugggususu | 2367 |
| D-1296 | gsusgggaGfaCfCfCfUfguguaccus{invAb} | 1636 | asAfsgGfuAfcacagggUfcUfcccacsusu | 2368 |
| D-1297 | gscsugggCfcAfGfUfAfaugggaacs{invAb} | 1637 | asGfsuUfcCfcauuacuGfgCfccagcsusu | 2369 |
| D-1298 | csasaaaaUfgAfCfAfAfcacuugaas{invAb} | 1638 | asUfsuCfaAfguguuguCfaUfuuuugsusu | 2370 |
| D-1299 | asusgacaAfcAfCfUfUfgaagcaugs{invAb} | 1639 | asCfsaUfgCfuucaaguGfuUfgucaususu | 2371 |
| D-1300 | ascsuugaAfgCfAfUfGfguguuucas{invAb} | 1640 | asUfsgAfaAfcaccaugCfuUfcaagususu | 2372 |
| D-1301 | asasauuuGfuGfAfUfUfuucacauus{invAb} | 1641 | asAfsaUfgUfgaaaaucAfcAfaauuususu | 2373 |
| D-1302 | asasugcuUfcAfAfUfGfucccagugs{invAb} | 1642 | asCfsaCfuGfggacauuGfaAfgcauususu | 2374 |
| D-1303 | asasaugaCfaAfGfAfCfaggauucus{invAb} | 1643 | asAfsgAfaUfccugucuUfgUfcauuususu | 2375 |
| D-1304 | ususauggAfaUfAfGfUfucuuucucs{invAb} | 1644 | asGfsaGfaAfagaacuaUfuCfcauaasusu | 2376 |
| D-1305 | usasuggaAfuAfGfUfUfcuuucuccs{invAb} | 1645 | asGfsgAfgAfaagaacuAfuUfccauasusu | 2377 |
| D-1306 | gsasauagUfuCfUfUfUfcuccugcus{invAb} | 1646 | asAfsgCfaGfgagaaagAfaCfuauucsusu | 2378 |
| D-1307 | asasuaguUfcUfUfUfCfuccugcuus{invAb} | 1647 | asAfsaGfcAfggagaaaGfaAfcuauususu | 2379 |
| D-1308 | usgscaucCfuGfUfCfAfcuaccacus{invAb} | 1648 | asAfsgUfgGfuagugacAfgGfaugcasusu | 2380 |
| D-1309 | gscsauccUfgUfCfAfCfuaccacucs{invAb} | 1649 | asGfsaGfuGfguagugaCfaGfgaugcsusu | 2381 |
| D-1310 | cscsgggcUfaGfCfUfUfuugaaaugs{invAb} | 1650 | asCfsaUfuUfcaaaagcUfaGfcccggsusu | 2382 |
| D-1311 | csgsggcuAfgCfUfUfUfugaaauggs{invAb} | 1651 | asCfscAfuUfucaaaagCfuAfgcccgsusu | 2383 |
| D-1312 | asasgacuGfaGfGfUfGfaccuucags{invAb} | 1652 | asCfsuGfaAfggucaccUfcAfgucuususu | 2384 |
| D-1313 | asgsgugaCfcUfUfCfAfggaagcacs{invAb} | 1653 | asGfsuGfcUfuccugaaGfgUfcaccususu | 2385 |
| D-1314 | cscsauagAfuCfUfGfGfaucuggccs{invAb} | 1654 | asGfsgCfcAfgauccagAfuCfuauggsusu | 2386 |
| D-1315 | usgsgauuUfcCfUfAfAfaggugcucs{invAb} | 1655 | usGfsaGfcAfccuuuagGfaAfauccasusu | 2387 |
| D-1316 | gsasuuucCfuAfAfAfGfgugcucags{invAb} | 1656 | asCfsuGfaGfcaccuuuAfgGfaaaucsusu | 2388 |
| D-1317 | uscscuaaAfgGfUfGfCfucaggaggs{invAb} | 1657 | usCfscUfcCfugagcacCfuUfuaggasusu | 2389 |
| D-1318 | usgsgaggAfcCfCfCfUfggauccuus{invAb} | 1658 | asAfsaGfgAfuccagggGfuCfcuccasusu | 2390 |
| D-1319 | gsgsaggaCfcCfCfUfGfgauccuugs{invAb} | 1659 | asCfsaAfgGfauccaggGfgUfccuccsusu | 2391 |
| D-1320 | gsasggacCfcCfUfGfGfauccuugcs{invAb} | 1660 | asGfscAfaGfgauccagGfgGfuccucsusu | 2392 |
| D-1321 | csgsgaguGfcUfCfCfUfucuccagus{invAb} | 1661 | asAfscUfgGfagaaggaGfcAfcuccgsusu | 2393 |
| D-1322 | asgsaaggAfcGfCfAfCfugcucugas{invAb} | 1662 | asUfscAfgAfgcagugcGfuCfcuucususu | 2394 |
| D-1323 | csuscugaUfuGfGfCfCfcggaagggs{invAb} | 1663 | asCfscCfuUfccgggccAfaUfcagagsusu | 2395 |
| D-1324 | uscsugauUfgGfCfCfCfggaagggus{invAb} | 1664 | asAfscCfcUfuccgggcCfaAfucagasusu | 2396 |
| D-1325 | csusgauuGfgCfCfCfGfgaaggguus{invAb} | 1665 | asAfsaCfcCfuuccgggCfcAfaucagsusu | 2397 |
| D-1326 | gsgsccaaAfgGfCfCfGfcaccuuccs{invAb} | 1666 | asGfsgAfaGfgugcggcCfuUfuggccsusu | 2398 |
| D-1327 | cscsucgcGfgAfGfAfAfgccagccas{invAb} | 1667 | asUfsgGfcUfggcuucuCfcGfcgaggsusu | 2399 |
| D-1328 | gsgsagaaGfcCfAfGfCfcaugggcgs{invAb} | 1668 | asCfsgCfcCfauggcugGfcUfucuccsusu | 2400 |
| D-1329 | gsasgaagCfcAfGfCfCfaugggcgcs{invAb} | 1669 | asGfscGfcCfcauggcuGfgCfuucucsusu | 2401 |
| D-1330 | gsasucaaCfcAfGfGfAfgggaaacas{invAb} | 1670 | asUfsgUfuUfcccuccuGfgUfugaucsusu | 2402 |
| D-1331 | ascsugcuCfgCfCfAfGfgaaccucgs{invAb} | 1671 | asCfsgAfgGfuuccuggCfgAfgcagususu | 2403 |
| D-1332 | uscsgccaGfgAfAfCfCfucgccuggs{invAb} | 1672 | asCfscAfgGfcgagguuCfcUfggcgasusu | 2404 |
| D-1333 | gscscaggAfaCfCfUfCfgccuggucs{invAb} | 1673 | asGfsaCfcAfggcgaggUfuCfcuggcsusu | 2405 |
| D-1334 | gsasaccuCfgCfCfUfGfguccugaus{invAb} | 1674 | asAfsuCfaGfgaccaggCfgAfgguucsusu | 2406 |
| D-1335 | asusggugAfcAfCfCfCfugacucucs{invAb} | 1675 | usGfsaGfaGfucaggguGfuCfaccaususu | 2407 |
| D-1336 | usgsgugaCfaCfCfCfUfgacucucas{invAb} | 1676 | asUfsgAfgAfgucagggUfgUfcaccasusu | 2408 |
| D-1337 | gsascaccCfuGfAfCfUfcucagugcs{invAb} | 1677 | usGfscAfcUfgagagucAfgGfgugucsusu | 2409 |
| D-1338 | ascsccugAfcUfCfUfCfagugcagcs{invAb} | 1678 | asGfscUfgCfacugagaGfuCfagggususu | 2410 |
| D-1339 | cscsgcccAfgUfGfGfAfuaaccagcs{invAb} | 1679 | asGfscUfgGfuuauccaCfuGfggcggsusu | 2411 |
| D-1340 | cscsgccuGfgUfGfCfAfcuucgagcs{invAb} | 1680 | asGfscUfcGfaagugcaCfcAfggcggsusu | 2412 |
| D-1341 | csgsccugGfuGfCfAfCfuucgagccs{invAb} | 1681 | asGfsgCfuCfgaagugcAfcCfaggcgsusu | 2413 |
| D-1342 | gscscuggUfgCfAfCfUfucgagccus{invAb} | 1682 | asAfsgGfcUfcgaagugCfaCfcaggcsusu | 2414 |
| D-1343 | cscsugguGfcAfCfUfUfcgagccucs{invAb} | 1683 | usGfsaGfgCfucgaaguGfcAfccaggsusu | 2415 |
| D-1344 | csusggugCfaCfUfUfCfgagccucas{invAb} | 1684 | asUfsgAfgGfcucgaagUfgCfaccagsusu | 2416 |
| D-1345 | usgsgugcAfcUfUfCfGfagccucacs{invAb} | 1685 | usGfsuGfaGfgcucgaaGfuGfcaccasusu | 2417 |
| D-1346 | gsgsugcaCfuUfCfGfAfgccucacas{invAb} | 1686 | asUfsgUfgAfggcucgaAfgUfgcaccsusu | 2418 |
| D-1347 | gsusgcacUfuCfGfAfGfccucacaus{invAb} | 1687 | asAfsuGfuGfaggcucgAfaGfugcacsusu | 2419 |
| D-1348 | usgscacuUfcGfAfGfCfcucacaugs{invAb} | 1688 | asCfsaUfgUfgaggcucGfaAfgugcasusu | 2420 |
| D-1349 | gscsacuuCfgAfGfCfCfucacaugcs{invAb} | 1689 | asGfscAfuGfugaggcuCfgAfagugcsusu | 2421 |
| D-1350 | csascuucGfaGfCfCfUfcacaugcgs{invAb} | 1690 | usCfsgCfaUfgugaggcUfcGfaagugsusu | 2422 |
| D-1351 | ascsuucgAfgCfCfUfCfacaugcgas{invAb} | 1691 | asUfscGfcAfugugaggCfuCfgaagususu | 2423 |
| D-1352 | csusucgaGfcCfUfCfAfcaugcgacs{invAb} | 1692 | asGfsuCfgCfaugugagGfcUfcgaagsusu | 2424 |
| D-1353 | ususcgagCfcUfCfAfCfaugcgaccs{invAb} | 1693 | asGfsgUfcGfcaugugaGfgCfucgaasusu | 2425 |
| D-1354 | uscsgagcCfuCfAfCfAfugcgaccgs{invAb} | 1694 | usCfsgGfuCfgcaugugAfgGfcucgasusu | 2426 |
| D-1355 | csgsagccUfcAfCfAfUfgcgaccgas{invAb} | 1695 | asUfscGfgUfcgcauguGfaGfgcucgsusu | 2427 |
| D-1356 | gscscucaCfaUfGfCfGfaccgagacs{invAb} | 1696 | asGfsuCfuCfggucgcaUfgUfgaggcsusu | 2428 |
| D-1357 | csusugauCfcUfUfUfCfugaggcgus{invAb} | 1697 | asAfscGfcCfucagaaaGfgAfucaagsusu | 2429 |
| D-1358 | csusggcgGfaUfCfUfCfaacuccags{invAb} | 1698 | asCfsuGfgAfguugagaUfcCfgccagsusu | 2430 |
| D-1359 | usgsgcggAfuCfUfCfAfacuccaggs{invAb} | 1699 | asCfscUfgGfaguugagAfuCfcgccasusu | 2431 |
| D-1360 | gscsgaugUfcUfAfUfGfcagaggaus{invAb} | 1700 | asAfsuCfcUfcugcauaGfaCfaucgcsusu | 2432 |
| D-1361 | gsasugucUfaUfGfCfAfgaggauucs{invAb} | 1701 | asGfsaAfuCfcucugcaUfaGfacaucsusu | 2433 |
| D-1362 | usgsucuaUfgCfAfGfAfggauucuus{invAb} | 1702 | asAfsaGfaAfuccucugCfaUfagacasusu | 2434 |
| D-1363 | gsuscuauGfcAfGfAfGfgauucuugs{invAb} | 1703 | asCfsaAfgAfauccucuGfcAfuagacsusu | 2435 |
| D-1364 | uscsuaugCfaGfAfGfGfauucuuggs{invAb} | 1704 | asCfscAfaGfaauccucUfgCfauagasusu | 2436 |
| D-1365 | csusaugcAfgAfGfGfAfuucuugggs{invAb} | 1705 | usCfscCfaAfgaauccuCfuGfcauagsusu | 2437 |
| D-1366 | gsgsugauGfgCfUfUfGfuuccagaus{invAb} | 1706 | asAfsuCfuGfgaacaagCfcAfucaccsusu | 2438 |
| D-1367 | gsusgaugGfcUfUfGfUfuccagaugs{invAb} | 1707 | asCfsaUfcUfggaacaaGfcCfaucacsusu | 2439 |
| D-1368 | usgsgcuuGfuUfCfCfAfgaugcauus{invAb} | 1708 | asAfsaUfgCfaucuggaAfcAfagccasusu | 2440 |
| D-1369 | csasuuuuAfaCfCfAfCfaguggaccs{invAb} | 1709 | asGfsgUfcCfacuguggUfuAfaaaugsusu | 2441 |
| D-1370 | ususuuaaCfcAfCfAfGfuggacccas{invAb} | 1710 | asUfsgGfgUfccacuguGfgUfuaaaasusu | 2442 |
| D-1371 | ususuaacCfaCfAfGfUfggacccags{invAb} | 1711 | usCfsuGfgGfuccacugUfgGfuuaaasusu | 2443 |
| D-1372 | csasccacUfcUfUfUfGfggcaguaus{invAb} | 1712 | asAfsuAfcUfgcccaaaGfaGfuggugsusu | 2444 |
| D-1373 | ascscacuCfuUfUfGfGfgcaguauus{invAb} | 1713 | asAfsaUfaCfugcccaaAfgAfguggususu | 2445 |
| D-1374 | csusuuggGfcAfGfUfAfuuuugugcs{invAb} | 1714 | asGfscAfcAfaaauacuGfcCfcaaagsusu | 2446 |
| D-1375 | ususugggCfaGfUfAfUfuuugugcus{invAb} | 1715 | asAfsgCfaCfaaaauacUfgCfccaaasusu | 2447 |
| D-1376 | ususgggcAfgUfAfUfUfuugugcugs{invAb} | 1716 | asCfsaGfcAfcaaaauaCfuGfcccaasusu | 2448 |
| D-1377 | usgsggcaGfuAfUfUfUfugugcuggs{invAb} | 1717 | usCfscAfgCfacaaaauAfcUfgcccasusu | 2449 |
| D-1378 | gsgscaguAfuUfUfUfGfugcuggaas{invAb} | 1718 | usUfsuCfcAfgcacaaaAfuAfcugccsusu | 2450 |
| D-1379 | usasuuuuGfuGfCfUfGfgaaaacccs{invAb} | 1719 | usGfsgGfuUfuuccagcAfcAfaaauasusu | 2451 |
| D-1380 | asusuuugUfgCfUfGfGfaaaacccas{invAb} | 1720 | asUfsgGfgUfuuuccagCfaCfaaaaususu | 2452 |
| D-1381 | ascscguaUfgUfCfCfUfggaauauus{invAb} | 1721 | usAfsaUfaUfuccaggaCfaUfacggususu | 2453 |
| D-1382 | cscsguauGfuCfCfUfGfgaauauuas{invAb} | 1722 | asUfsaAfuAfuuccaggAfcAfuacggsusu | 2454 |
| D-1383 | gsusauguCfcUfGfGfAfauauuagas{invAb} | 1723 | asUfscUfaAfuauuccaGfgAfcauacsusu | 2455 |
| D-1384 | usasugucCfuGfGfAfAfuauuagaus{invAb} | 1724 | asAfsuCfuAfauauuccAfgGfacauasusu | 2456 |
| D-1385 | asusguccUfgGfAfAfUfauuagaugs{invAb} | 1725 | asCfsaUfcUfaauauucCfaGfgacaususu | 2457 |
| D-1386 | usgsuccuGfgAfAfUfAfuuagaugcs{invAb} | 1726 | asGfscAfuCfuaauauuCfcAfggacasusu | 2458 |
| D-1387 | gsusccugGfaAfUfAfUfuagaugccs{invAb} | 1727 | asGfsgCfaUfcuaauauUfcCfaggacsusu | 2459 |
| D-1388 | uscscuggAfaUfAfUfUfagaugccus{invAb} | 1728 | asAfsgGfcAfucuaauaUfuCfcaggasusu | 2460 |
| D-1389 | cscsuggaAfuAfUfUfAfgaugccuus{invAb} | 1729 | asAfsaGfgCfaucuaauAfuUfccaggsusu | 2461 |
| D-1390 | csusggaaUfaUfUfAfGfaugccuuus{invAb} | 1730 | asAfsaAfgGfcaucuaaUfaUfuccagsusu | 2462 |
| D-1391 | csasugguGfuUfUfCfAfgaacugags{invAb} | 1731 | usCfsuCfaGfuucugaaAfcAfccaugsusu | 2463 |
| D-1392 | asusggugUfuUfCfAfGfaacugagas{invAb} | 1732 | asUfscUfcAfguucugaAfaCfaccaususu | 2464 |
| D-1393 | usgsguguUfuCfAfGfAfacugagacs{invAb} | 1733 | asGfsuCfuCfaguucugAfaAfcaccasusu | 2465 |
| D-1394 | gsgsuguuUfcAfGfAfAfcugagaccs{invAb} | 1734 | asGfsgUfcUfcaguucuGfaAfacaccsusu | 2466 |
| D-1395 | gsasggagAfaGfAfAfAfagugauucs{invAb} | 1735 | usGfsaAfuCfacuuuucUfuCfuccucsusu | 2467 |
| D-1396 | asgsaagaAfaAfGfUfGfauucagugs{invAb} | 1736 | usCfsaCfuGfaaucacuUfuUfcuucususu | 2468 |
| D-1397 | gsasagaaAfaGfUfGfAfuucagugas{invAb} | 1737 | asUfscAfcUfgaaucacUfuUfucuucsusu | 2469 |
| D-1398 | gsasaaagUfgAfUfUfCfagugauuus{invAb} | 1738 | asAfsaAfuCfacugaauCfaCfuuuucsusu | 2470 |
| D-1399 | asasagugAfuUfCfAfGfugauuucas{invAb} | 1739 | asUfsgAfaAfucacugaAfuCfacuuususu | 2471 |
| D-1400 | ascsuacuGfaAfAfAfCfcuuuaaags{invAb} | 1740 | asCfsuUfuAfaagguuuUfcAfguagususu | 2472 |
| D-1401 | usascugaAfaAfCfCfUfuuaaagggs{invAb} | 1741 | asCfscCfuUfuaaagguUfuUfcaguasusu | 2473 |
| D-1402 | usgsuauaAfcUfCfUfAfagaucugas{invAb} | 1742 | asUfscAfgAfucuuagaGfuUfauacasusu | 2474 |
| D-1403 | usasuaacUfcUfAfAfGfaucugaugs{invAb} | 1743 | usCfsaUfcAfgaucuuaGfaGfuuauasusu | 2475 |
| D-1404 | asusaacuCfuAfAfGfAfucugaugas{invAb} | 1744 | usUfscAfuCfagaucuuAfgAfguuaususu | 2476 |
| D-1405 | usasacucUfaAfGfAfUfcugaugaas{invAb} | 1745 | asUfsuCfaUfcagaucuUfaGfaguuasusu | 2477 |
| D-1406 | asascucuAfaGfAfUfCfugaugaags{invAb} | 1746 | asCfsuUfcAfucagaucUfuAfgaguususu | 2478 |
| D-1407 | ascsucuaAfgAfUfCfUfgaugaagus{invAb} | 1747 | usAfscUfuCfaucagauCfuUfagagususu | 2479 |
| D-1408 | gsasuuggCfcCfGfGfAfaggguucas{invAb} | 1748 | asUfsgAfaCfccuuccgGfgCfcaaucsusu | 2480 |
| D-1409 | cscsuuugGfgCfUfCfGfgggccaaas{invAb} | 1749 | asUfsuUfgGfccccgagCfcCfaaaggsusu | 2481 |
| D-1410 | ususgggcUfcGfGfGfGfccaaaggcs{invAb} | 1750 | asGfscCfuUfuggccccGfaGfcccaasusu | 2482 |
| D-1411 | csgscaccUfuCfCfCfCfcagcggccs{invAb} | 1751 | asGfsgCfcGfcugggggAfaGfgugcgsusu | 2483 |
| D-1412 | cscsgccgCfcAfCfCfUfcgcggagas{invAb} | 1752 | usUfscUfcCfgcgagguGfgCfggcggsusu | 2484 |
| D-1413 | uscscgcgCfuGfGfCfGfcgcuuugus{invAb} | 1753 | asAfscAfaAfgcgcgccAfgCfgcggasusu | 2485 |
| D-1414 | cscsgcgcUfgGfCfGfCfgcuuugucs{invAb} | 1754 | asGfsaCfaAfagcgcgcCfaGfcgcggsusu | 2486 |
| D-1415 | csgscgcuGfgCfGfCfGfcuuuguccs{invAb} | 1755 | asGfsgAfcAfaagcgcgCfcAfgcgcgsusu | 2487 |
| D-1416 | csgscgcuUfuGfUfCfCfuccucgcgs{invAb} | 1756 | asCfsgCfgAfggaggacAfaAfgcgcgsusu | 2488 |
| D-1417 | gscsgcuuUfgUfCfCfUfccucgcgcs{invAb} | 1757 | usGfscGfcGfaggaggaCfaAfagcgcsusu | 2489 |
| D-1418 | csgscuuuGfuCfCfUfCfcucgcgcas{invAb} | 1758 | usUfsgCfgCfgaggaggAfcAfaagcgsusu | 2490 |
| D-1419 | gscsuuugUfcCfUfCfCfucgcgcaas{invAb} | 1759 | asUfsuGfcGfcgaggagGfaCfaaagcsusu | 2491 |
| D-1420 | csusuuguCfcUfCfCfUfcgcgcaaus{invAb} | 1760 | asAfsuUfgCfgcgaggaGfgAfcaaagsusu | 2492 |
| D-1421 | ususugucCfuCfCfUfCfgcgcaaucs{invAb} | 1761 | asGfsaUfuGfcgcgaggAfgGfacaaasusu | 2493 |
| D-1422 | usgsuccuCfcUfCfGfCfgcaaucccs{invAb} | 1762 | asGfsgGfaUfugcgcgaGfgAfggacasusu | 2494 |
| D-1423 | gsusccucCfuCfGfCfGfcaaucccgs{invAb} | 1763 | asCfsgGfgAfuugcgcgAfgGfaggacsusu | 2495 |
| D-1424 | uscscuccUfcGfCfGfCfaaucccggs{invAb} | 1764 | asCfscGfgGfauugcgcGfaGfgaggasusu | 2496 |
| D-1425 | cscsuccuCfgCfGfCfAfaucccggcs{invAb} | 1765 | asGfscCfgGfgauugcgCfgAfggaggsusu | 2497 |
| D-1426 | csuscgcgCfaAfUfCfCfcggcccggs{invAb} | 1766 | asCfscGfgGfccgggauUfgCfgcgagsusu | 2498 |
| D-1427 | gscsgcaaUfcCfCfGfGfcccgggugs{invAb} | 1767 | asCfsaCfcCfgggccggGfaUfugcgcsusu | 2499 |
| D-1428 | csgscaauCfcCfGfGfCfccggguggs{invAb} | 1768 | asCfscAfcCfcgggccgGfgAfuugcgsusu | 2500 |
| D-1429 | gscsaaucCfcGfGfCfCfcggguggcs{invAb} | 1769 | asGfscCfaCfccgggccGfgGfauugcsusu | 2501 |
| D-1430 | gsgscccgGfgUfGfGfCfucgggguus{invAb} | 1770 | asAfsaCfcCfcgagccaCfcCfgggccsusu | 2502 |
| D-1431 | gscsccggGfuGfGfCfUfcgggguugs{invAb} | 1771 | asCfsaAfcCfccgagccAfcCfcgggcsusu | 2503 |
| D-1432 | cscscgggUfgGfCfUfCfgggguugcs{invAb} | 1772 | asGfscAfaCfcccgagcCfaCfccgggsusu | 2504 |
| D-1433 | uscsggggUfuGfCfCfGfcgcugggcs{invAb} | 1773 | asGfscCfcAfgcgcggcAfaCfcccgasusu | 2505 |
| D-1434 | gsgsuugcCfgCfGfCfUfgggccugas{invAb} | 1774 | asUfscAfgGfcccagcgCfgGfcaaccsusu | 2506 |
| D-1435 | gscscgcgCfuGfGfGfCfcugaccgcs{invAb} | 1775 | asGfscGfgUfcaggcccAfgCfgcggcsusu | 2507 |
| D-1436 | gscsgcugGfgCfCfUfGfaccgcggus{invAb} | 1776 | asAfscCfgCfggucaggCfcCfagcgcsusu | 2508 |
| D-1437 | usgsggccUfgAfCfCfGfcgguggcgs{invAb} | 1777 | asCfsgCfcAfccgcgguCfaGfgcccasusu | 2509 |
| D-1438 | gsgsgccuGfaCfCfGfCfgguggcgcs{invAb} | 1778 | asGfscGfcCfaccgcggUfcAfggcccsusu | 2510 |
| D-1439 | gsasgggaAfaCfAfUfGfguuacugcs{invAb} | 1779 | asGfscAfgUfaaccaugUfuUfcccucsusu | 2511 |
| D-1440 | gsgsaaacAfuGfGfUfUfacugcucgs{invAb} | 1780 | asCfsgAfgCfaguaaccAfuGfuuuccsusu | 2512 |
| D-1441 | gsasaacaUfgGfUfUfAfcugcucgcs{invAb} | 1781 | asGfscGfaGfcaguaacCfaUfguuucsusu | 2513 |
| D-1442 | asasacauGfgUfUfAfCfugcucgccs{invAb} | 1782 | usGfsgCfgAfgcaguaaCfcAfuguuususu | 2514 |
| D-1443 | asascaugGfuUfAfCfUfgcucgccas{invAb} | 1783 | asUfsgGfcGfagcaguaAfcCfauguususu | 2515 |
| D-1444 | ascsauggUfuAfCfUfGfcucgccags{invAb} | 1784 | asCfsuGfgCfgagcaguAfaCfcaugususu | 2516 |
| D-1445 | gsusuacuGfcUfCfGfCfcaggaaccs{invAb} | 1785 | asGfsgUfuCfcuggcgaGfcAfguaacsusu | 2517 |
| D-1446 | ususcccuGfaCfCfUfGfcgauggugs{invAb} | 1786 | usCfsaCfcAfucgcaggUfcAfgggaasusu | 2518 |
| D-1447 | ascscugcGfaUfGfGfUfgacacccus{invAb} | 1787 | asAfsgGfgUfgucaccaUfcGfcaggususu | 2519 |
| D-1448 | gsusgcagCfcUfAfCfAfcaaaggacs{invAb} | 1788 | asGfsuCfcUfuuguguaGfgCfugcacsusu | 2520 |
| D-1449 | usgscagcCfuAfCfAfCfaaaggaccs{invAb} | 1789 | asGfsgUfcCfuuuguguAfgGfcugcasusu | 2521 |
| D-1450 | csasgccuAfcAfCfAfAfaggaccuas{invAb} | 1790 | asUfsaGfgUfccuuuguGfuAfggcugsusu | 2522 |
| D-1451 | asgsccuaCfaCfAfAfAfggaccuacs{invAb} | 1791 | asGfsuAfgGfuccuuugUfgUfaggcususu | 2523 |
| D-1452 | gscscuacAfcAfAfAfGfgaccuacus{invAb} | 1792 | usAfsgUfaGfguccuuuGfuGfuaggcsusu | 2524 |
| D-1453 | cscsuacaCfaAfAfGfGfaccuacuas{invAb} | 1793 | asUfsaGfuAfgguccuuUfgUfguaggsusu | 2525 |
| D-1454 | csusacacAfaAfGfGfAfccuacuacs{invAb} | 1794 | asGfsuAfgUfagguccuUfuGfuguagsusu | 2526 |
| D-1455 | csascaaaGfgAfCfCfUfacuacugcs{invAb} | 1795 | asGfscAfgUfaguagguCfcUfuugugsusu | 2527 |
| D-1456 | asgsgaccUfaCfUfAfCfugccuaucs{invAb} | 1796 | usGfsaUfaGfgcaguagUfaGfguccususu | 2528 |
| D-1457 | gsgsaccuAfcUfAfCfUfgccuaucas{invAb} | 1797 | usUfsgAfuAfggcaguaGfuAfgguccsusu | 2529 |
| D-1458 | ascscuacUfaCfUfGfCfcuaucaaas{invAb} | 1798 | usUfsuUfgAfuaggcagUfaGfuaggususu | 2530 |
| D-1459 | usascuacUfgCfCfUfAfucaaaacgs{invAb} | 1799 | asCfsgUfuUfugauaggCfaGfuaguasusu | 2531 |
| D-1460 | csusacugCfcUfAfUfCfaaaacgccs{invAb} | 1800 | asGfsgCfgUfuuugauaGfgCfaguagsusu | 2532 |
| D-1461 | gscscuauCfaAfAfAfCfgcccaccas{invAb} | 1801 | asUfsgGfuGfggcguuuUfgAfuaggcsusu | 2533 |
| D-1462 | ascscacaAfaUfGfCfAfgugcacaas{invAb} | 1802 | asUfsuGfuGfcacugcaUfuUfguggususu | 2534 |
| D-1463 | csascaaaUfgCfAfGfUfgcacaagus{invAb} | 1803 | asAfscUfuGfugcacugCfaUfuugugsusu | 2535 |
| D-1464 | csasaaugCfaGfUfGfCfacaagugcs{invAb} | 1804 | usGfscAfcUfugugcacUfgCfauuugsusu | 2536 |
| D-1465 | asusgcagUfgCfAfCfAfagugcagas{invAb} | 1805 | asUfscUfgCfacuugugCfaCfugcaususu | 2537 |
| D-1466 | asgsugcaCfaAfGfUfGfcagagugcs{invAb} | 1806 | usGfscAfcUfcugcacuUfgUfgcacususu | 2538 |
| D-1467 | ascsaaguGfcAfGfAfGfugcacggcs{invAb} | 1807 | asGfscCfgUfgcacucuGfcAfcuugususu | 2539 |
| D-1468 | csasagugCfaGfAfGfUfgcacggccs{invAb} | 1808 | asGfsgCfcGfugcacucUfgCfacuugsusu | 2540 |
| D-1469 | usgscagaGfuGfCfAfCfggccuggas{invAb} | 1809 | asUfscCfaGfgccgugcAfcUfcugcasusu | 2541 |
| D-1470 | asgsagugCfaCfGfGfCfcuggagaus{invAb} | 1810 | usAfsuCfuCfcaggccgUfgCfacucususu | 2542 |
| D-1471 | gsasgugcAfcGfGfCfCfuggagauas{invAb} | 1811 | asUfsaUfcUfccaggccGfuGfcacucsusu | 2543 |
| D-1472 | usgsgagaUfaGfAfGfGfgcagggacs{invAb} | 1812 | asGfsuCfcCfugcccucUfaUfcuccasusu | 2544 |
| D-1473 | uscscugaAfgUfCfAfCfagcccuacs{invAb} | 1813 | asGfsuAfgGfgcugugaCfuUfcaggasusu | 2545 |
| D-1474 | csusgaagUfcAfCfAfGfcccuaccgs{invAb} | 1814 | asCfsgGfuAfgggcuguGfaCfuucagsusu | 2546 |
| D-1475 | gsasagucAfcAfGfCfCfcuaccgccs{invAb} | 1815 | asGfsgCfgGfuagggcuGfuGfacuucsusu | 2547 |
| D-1476 | cscsucacAfuGfCfGfAfccgagacgs{invAb} | 1816 | asCfsgUfcUfcggucgcAfuGfugaggsusu | 2548 |
| D-1477 | csuscacaUfgCfGfAfCfcgagacgus{invAb} | 1817 | asAfscGfuCfucggucgCfaUfgugagsusu | 2549 |
| D-1478 | uscsacauGfcGfAfCfCfgagacgucs{invAb} | 1818 | asGfsaCfgUfcucggucGfcAfugugasusu | 2550 |
| D-1479 | csascaugCfgAfCfCfGfagacguccs{invAb} | 1819 | asGfsgAfcGfucucgguCfgCfaugugsusu | 2551 |
| D-1480 | ascsaugcGfaCfCfGfAfgacguccus{invAb} | 1820 | asAfsgGfaCfgucucggUfcGfcaugususu | 2552 |
| D-1481 | usgscgacCfgAfGfAfCfguccucaus{invAb} | 1821 | asAfsuGfaGfgacgucuCfgGfucgcasusu | 2553 |
| D-1482 | gscsgaccGfaGfAfCfGfuccucaucs{invAb} | 1822 | usGfsaUfgAfggacgucUfcGfgucgcsusu | 2554 |
| D-1483 | cscsgagaCfgUfCfCfUfcaucaaaus{invAb} | 1823 | usAfsuUfuGfaugaggaCfgUfcucggsusu | 2555 |
| D-1484 | csgsagacGfuCfCfUfCfaucaaauas{invAb} | 1824 | asUfsaUfuUfgaugaggAfcGfucucgsusu | 2556 |
| D-1485 | asgsacguCfcUfCfAfUfcaaauagcs{invAb} | 1825 | usGfscUfaUfuugaugaGfgAfcgucususu | 2557 |
| D-1486 | uscscucaUfcAfAfAfUfagcagacus{invAb} | 1826 | asAfsgUfcUfgcuauuuGfaUfgaggasusu | 2558 |
| D-1487 | csuscaucAfaAfUfAfGfcagacuugs{invAb} | 1827 | asCfsaAfgUfcugcuauUfuGfaugagsusu | 2559 |
| D-1488 | csasgacaCfcAfGfCfCfcauucuugs{invAb} | 1828 | usCfsaAfgAfaugggcuGfgUfgucugsusu | 2560 |
| D-1489 | asgsacacCfaGfCfCfCfauucuugas{invAb} | 1829 | asUfscAfaGfaaugggcUfgGfugucususu | 2561 |
| D-1490 | gsascaccAfgCfCfCfAfuucuugaus{invAb} | 1830 | asAfsuCfaAfgaaugggCfuGfgugucsusu | 2562 |
| D-1491 | csasgcccAfuUfCfUfUfgauccuuus{invAb} | 1831 | asAfsaAfgGfaucaagaAfuGfggcugsusu | 2563 |
| D-1492 | cscsauucUfuGfAfUfCfcuuucugas{invAb} | 1832 | asUfscAfgAfaaggaucAfaGfaauggsusu | 2564 |
| D-1493 | gscsagagGfaUfUfCfUfugggaugas{invAb} | 1833 | asUfscAfuCfccaagaaUfcCfucugcsusu | 2565 |
| D-1494 | asusucuuGfgGfAfUfGfagcuucuus{invAb} | 1834 | usAfsaGfaAfgcucaucCfcAfagaaususu | 2566 |
| D-1495 | csusugggAfuGfAfGfCfuucuuauus{invAb} | 1835 | asAfsaUfaAfgaagcucAfuCfccaagsusu | 2567 |
| D-1496 | gsgsgaugAfgCfUfUfCfuuauuggus{invAb} | 1836 | asAfscCfaAfuaagaagCfuCfaucccsusu | 2568 |
| D-1497 | gsgsaugaGfcUfUfCfUfuauuggugs{invAb} | 1837 | usCfsaCfcAfauaagaaGfcUfcauccsusu | 2569 |
| D-1498 | gsusggaaCfuGfAfAfAfagggugaus{invAb} | 1838 | asAfsuCfaCfccuuuucAfgUfuccacsusu | 2570 |
| D-1499 | usgsgaacUfgAfAfAfAfgggugaugs{invAb} | 1839 | asCfsaUfcAfcccuuuuCfaGfuuccasusu | 2571 |
| D-1500 | gsasacugAfaAfAfGfGfgugauggcs{invAb} | 1840 | asGfscCfaUfcacccuuUfuCfaguucsusu | 2572 |
| D-1501 | csusgaaaAfgGfGfUfGfauggcuugs{invAb} | 1841 | asCfsaAfgCfcaucaccCfuUfuucagsusu | 2573 |
| D-1502 | usgsaaaaGfgGfUfGfAfuggcuugus{invAb} | 1842 | asAfscAfaGfccaucacCfcUfuuucasusu | 2574 |
| D-1503 | gsasaaagGfgUfGfAfUfggcuuguus{invAb} | 1843 | asAfsaCfaAfgccaucaCfcCfuuuucsusu | 2575 |
| D-1504 | asasaaggGfuGfAfUfGfgcuuguucs{invAb} | 1844 | asGfsaAfcAfagccaucAfcCfcuuuususu | 2576 |
| D-1505 | gsusggacCfcAfGfAfCfaccggugus{invAb} | 1845 | asAfscAfcCfggugucuGfgGfuccacsusu | 2577 |
| D-1506 | usgsgaccCfaGfAfCfAfccggugucs{invAb} | 1846 | usGfsaCfaCfcggugucUfgGfguccasusu | 2578 |
| D-1507 | gsgsacccAfgAfCfAfCfcggugucas{invAb} | 1847 | asUfsgAfcAfccgguguCfuGfgguccsusu | 2579 |
| D-1508 | ascsccagAfcAfCfCfGfgugucaugs{invAb} | 1848 | usCfsaUfgAfcaccgguGfuCfugggususu | 2580 |
| D-1509 | cscsagacAfcCfGfGfUfgucaugags{invAb} | 1849 | asCfsuCfaUfgacaccgGfuGfucuggsusu | 2581 |
| D-1510 | csasccggUfgUfCfAfUfgagcaggas{invAb} | 1850 | usUfscCfuGfcucaugaCfaCfcggugsusu | 2582 |
| D-1511 | gsuscaugAfgCfAfGfGfaaggaaccs{invAb} | 1851 | asGfsgUfuCfcuuccugCfuCfaugacsusu | 2583 |
| D-1512 | asusgagcAfgGfAfAfGfgaaccgcus{invAb} | 1852 | asAfsgCfgGfuuccuucCfuGfcucaususu | 2584 |
| D-1513 | asgsgaagGfaAfCfCfGfcuggaaacs{invAb} | 1853 | usGfsuUfuCfcagcgguUfcCfuuccususu | 2585 |
| D-1514 | gsgsaaggAfaCfCfGfCfuggaaacas{invAb} | 1854 | asUfsgUfuUfccagcggUfuCfcuuccsusu | 2586 |
| D-1515 | gsasaggaAfcCfGfCfUfggaaacacs{invAb} | 1855 | asGfsuGfuUfuccagcgGfuUfccuucsusu | 2587 |
| D-1516 | csusgggcCfaGfUfAfAfugggaaccs{invAb} | 1856 | asGfsgUfuCfccauuacUfgGfcccagsusu | 2588 |
| D-1517 | gsgsgccaGfuAfAfUfGfggaaccgus{invAb} | 1857 | usAfscGfgUfucccauuAfcUfggcccsusu | 2589 |
| D-1518 | gsgsccagUfaAfUfGfGfgaaccguas{invAb} | 1858 | asUfsaCfgGfuucccauUfaCfuggccsusu | 2590 |
| D-1519 | gscscaguAfaUfGfGfGfaaccguaus{invAb} | 1859 | asAfsuAfcGfguucccaUfuAfcuggcsusu | 2591 |
| D-1520 | cscsaguaAfuGfGfGfAfaccguaugs{invAb} | 1860 | asCfsaUfaCfgguucccAfuUfacuggsusu | 2592 |
| D-1521 | csasguaaUfgGfGfAfAfccguaugus{invAb} | 1861 | asAfscAfuAfcgguuccCfaUfuacugsusu | 2593 |
| D-1522 | asgsuaauGfgGfAfAfCfcguaugucs{invAb} | 1862 | asGfsaCfaUfacgguucCfcAfuuacususu | 2594 |
| D-1523 | usgsggaaCfcGfUfAfUfguccuggas{invAb} | 1863 | usUfscCfaGfgacauacGfgUfucccasusu | 2595 |
| D-1524 | gsgsaaccGfuAfUfGfUfccuggaaus{invAb} | 1864 | usAfsuUfcCfaggacauAfcGfguuccsusu | 2596 |
| D-1525 | gsasauauUfaGfAfUfGfccuuuuaas{invAb} | 1865 | usUfsuAfaAfaggcaucUfaAfuauucsusu | 2597 |
| D-1526 | gsasugccUfuUfUfAfAfaaauguucs{invAb} | 1866 | asGfsaAfcAfuuuuuaaAfaGfgcaucsusu | 2598 |
| D-1527 | gsusuucaGfaAfCfUfGfagaccucus{invAb} | 1867 | usAfsgAfgGfucucaguUfcUfgaaacsusu | 2599 |
| D-1528 | uscsagaaCfuGfAfGfAfccucuacas{invAb} | 1868 | asUfsgUfaGfaggucucAfgUfucugasusu | 2600 |
| D-1529 | ascsugagAfcCfUfCfUfacauuuucs{invAb} | 1869 | asGfsaAfaAfuguagagGfuCfucagususu | 2601 |
| D-1530 | csusgagaCfcUfCfUfAfcauuuucus{invAb} | 1870 | asAfsgAfaAfauguagaGfgUfcucagsusu | 2602 |
| D-1531 | usgsagacCfuCfUfAfCfauuuucuus{invAb} | 1871 | asAfsaGfaAfaauguagAfgGfucucasusu | 2603 |
| D-1532 | usgsauuuUfcAfCfAfUfuuuucgucs{invAb} | 1872 | asGfsaCfgAfaaaauguGfaAfaaucasusu | 2604 |
| D-1533 | gsasuuuuCfaCfAfUfUfuuucgucus{invAb} | 1873 | asAfsgAfcGfaaaaaugUfgAfaaaucsusu | 2605 |
| D-1534 | asusuuucAfcAfUfUfUfuucgucuus{invAb} | 1874 | asAfsaGfaCfgaaaaauGfuGfaaaaususu | 2606 |
| D-1535 | ususucacAfuUfUfUfUfcgucuuuus{invAb} | 1875 | asAfsaAfaGfacgaaaaAfuGfugaaasusu | 2607 |
| D-1536 | ususcacaUfuUfUfUfCfgucuuuugs{invAb} | 1876 | asCfsaAfaAfgacgaaaAfaUfgugaasusu | 2608 |
| D-1537 | uscsacauUfuUfUfCfGfucuuuuggs{invAb} | 1877 | usCfscAfaAfagacgaaAfaAfugugasusu | 2609 |
| D-1538 | ascsauuuUfuCfGfUfCfuuuuggacs{invAb} | 1878 | asGfsuCfcAfaaagacgAfaAfaaugususu | 2610 |
| D-1539 | ususuucgUfcUfUfUfUfggacuucus{invAb} | 1879 | asAfsgAfaGfuccaaaaGfaCfgaaaasusu | 2611 |
| D-1540 | ususucguCfuUfUfUfGfgacuucugs{invAb} | 1880 | asCfsaGfaAfguccaaaAfgAfcgaaasusu | 2612 |
| D-1541 | ususcgucUfuUfUfGfGfacuucuggs{invAb} | 1881 | asCfscAfgAfaguccaaAfaGfacgaasusu | 2613 |
| D-1542 | uscsgucuUfuUfGfGfAfcuucuggus{invAb} | 1882 | asAfscCfaGfaaguccaAfaAfgacgasusu | 2614 |
| D-1543 | csusuuugGfaCfUfUfCfuggugucus{invAb} | 1883 | asAfsgAfcAfccagaagUfcCfaaaagsusu | 2615 |
| D-1544 | ususggacUfuCfUfGfGfugucucaas{invAb} | 1884 | asUfsuGfaGfacaccagAfaGfuccaasusu | 2616 |
| D-1545 | gsgsacuuCfuGfGfUfGfucucaaugs{invAb} | 1885 | asCfsaUfuGfagacaccAfgAfaguccsusu | 2617 |
| D-1546 | gsascuucUfgGfUfGfUfcucaaugcs{invAb} | 1886 | asGfscAfuUfgagacacCfaGfaagucsusu | 2618 |
| D-1547 | ususcuggUfgUfCfUfCfaaugcuucs{invAb} | 1887 | usGfsaAfgCfauugagaCfaCfcagaasusu | 2619 |
| D-1548 | gscsuucaAfuGfUfCfCfcagugcaas{invAb} | 1888 | usUfsuGfcAfcugggacAfuUfgaagcsusu | 2620 |
| D-1549 | asusguccCfaGfUfGfCfaaaaaguas{invAb} | 1889 | usUfsaCfuUfuuugcacUfgGfgacaususu | 2621 |
| D-1550 | usgsucccAfgUfGfCfAfaaaaguaas{invAb} | 1890 | usUfsuAfcUfuuuugcaCfuGfggacasusu | 2622 |
| D-1551 | gsuscccaGfuGfCfAfAfaaaguaaas{invAb} | 1891 | asUfsuUfaCfuuuuugcAfcUfgggacsusu | 2623 |
| D-1552 | uscsccagUfgCfAfAfAfaaguaaags{invAb} | 1892 | usCfsuUfuAfcuuuuugCfaCfugggasusu | 2624 |
| D-1553 | asgsugcaAfaAfAfGfUfaaagaaaus{invAb} | 1893 | usAfsuUfuCfuuuacuuUfuUfgcacususu | 2625 |
| D-1554 | asasgaaaUfaUfAfGfUfcucaauaas{invAb} | 1894 | asUfsuAfuUfgagacuaUfaUfuucuususu | 2626 |
| D-1555 | asasauauAfgUfCfUfCfaauaacuus{invAb} | 1895 | usAfsaGfuUfauugagaCfuAfuauuususu | 2627 |
| D-1556 | asusauagUfcUfCfAfAfuaacuuags{invAb} | 1896 | asCfsuAfaGfuuauugaGfaCfuauaususu | 2628 |
| D-1557 | usasuaguCfuCfAfAfUfaacuuagus{invAb} | 1897 | usAfscUfaAfguuauugAfgAfcuauasusu | 2629 |
| D-1558 | asusagucUfcAfAfUfAfacuuaguas{invAb} | 1898 | asUfsaCfuAfaguuauuGfaGfacuaususu | 2630 |
| D-1559 | usasgucuCfaAfUfAfAfcuuaguags{invAb} | 1899 | asCfsuAfcUfaaguuauUfgAfgacuasusu | 2631 |
| D-1560 | asgsucucAfaUfAfAfCfuuaguaggs{invAb} | 1900 | usCfscUfaCfuaaguuaUfuGfagacususu | 2632 |
| D-1561 | uscsaauaAfcUfUfAfGfuaggacuus{invAb} | 1901 | asAfsaGfuCfcuacuaaGfuUfauugasusu | 2633 |
| D-1562 | csasauaaCfuUfAfGfUfaggacuucs{invAb} | 1902 | usGfsaAfgUfccuacuaAfgUfuauugsusu | 2634 |
| D-1563 | asusaacuUfaGfUfAfGfgacuucags{invAb} | 1903 | asCfsuGfaAfguccuacUfaAfguuaususu | 2635 |
| D-1564 | asascuuaGfuAfGfGfAfcuucaguas{invAb} | 1904 | usUfsaCfuGfaaguccuAfcUfaaguususu | 2636 |
| D-1565 | ascsuuagUfaGfGfAfCfuucaguaas{invAb} | 1905 | asUfsuAfcUfgaaguccUfaCfuaagususu | 2637 |
| D-1566 | ususaguaGfgAfCfUfUfcaguaagus{invAb} | 1906 | asAfscUfuAfcugaaguCfcUfacuaasusu | 2638 |
| D-1567 | usasguagGfaCfUfUfCfaguaagucs{invAb} | 1907 | usGfsaCfuUfacugaagUfcCfuacuasusu | 2639 |
| D-1568 | asgsuaggAfcUfUfCfAfguaagucas{invAb} | 1908 | asUfsgAfcUfuacugaaGfuCfcuacususu | 2640 |
| D-1569 | usasggacUfuCfAfGfUfaagucacus{invAb} | 1909 | asAfsgUfgAfcuuacugAfaGfuccuasusu | 2641 |
| D-1570 | usasaaugAfcAfAfGfAfcaggauucs{invAb} | 1910 | asGfsaAfuCfcugucuuGfuCfauuuasusu | 2642 |
| D-1571 | gsgsauucUfgAfAfAfAfcuccccgus{invAb} | 1911 | asAfscGfgGfgaguuuuCfaGfaauccsusu | 2643 |
| D-1572 | gsasuucuGfaAfAfAfCfuccccguus{invAb} | 1912 | asAfsaCfgGfggaguuuUfcAfgaaucsusu | 2644 |
| D-1573 | ususcugaAfaAfCfUfCfcccguuuas{invAb} | 1913 | usUfsaAfaCfggggaguUfuUfcagaasusu | 2645 |
| D-1574 | uscsugaaAfaCfUfCfCfccguuuaas{invAb} | 1914 | asUfsuAfaAfcggggagUfuUfucagasusu | 2646 |
| D-1575 | csusgaaaAfcUfCfCfCfcguuuaacs{invAb} | 1915 | asGfsuUfaAfacggggaGfuUfuucagsusu | 2647 |
| D-1576 | usgsaaaaCfuCfCfCfCfguuuaacus{invAb} | 1916 | asAfsgUfuAfaacggggAfgUfuuucasusu | 2648 |
| D-1577 | asasaacuCfcCfCfGfUfuuaacugas{invAb} | 1917 | asUfscAfgUfuaaacggGfgAfguuuususu | 2649 |
| D-1578 | ascsucccCfgUfUfUfAfacugauuas{invAb} | 1918 | asUfsaAfuCfaguuaaaCfgGfggagususu | 2650 |
| D-1579 | csusccccGfuUfUfAfAfcugauuaus{invAb} | 1919 | asAfsuAfaUfcaguuaaAfcGfgggagsusu | 2651 |
| D-1580 | uscscccgUfuUfAfAfCfugauuaugs{invAb} | 1920 | asCfsaUfaAfucaguuaAfaCfggggasusu | 2652 |
| D-1581 | cscsccguUfuAfAfCfUfgauuauggs{invAb} | 1921 | usCfscAfuAfaucaguuAfaAfcggggsusu | 2653 |
| D-1582 | ususcuccUfgCfUfUfCfuccguuuas{invAb} | 1922 | asUfsaAfaCfggagaagCfaGfgagaasusu | 2654 |
| D-1583 | uscsuccuGfcUfUfCfUfccguuuaus{invAb} | 1923 | asAfsuAfaAfcggagaaGfcAfggagasusu | 2655 |
| D-1584 | csusccugCfuUfCfUfCfcguuuaucs{invAb} | 1924 | asGfsaUfaAfacggagaAfgCfaggagsusu | 2656 |
| D-1585 | cscsugcuUfcUfCfCfGfuuuaucuas{invAb} | 1925 | asUfsaGfaUfaaacggaGfaAfgcaggsusu | 2657 |
| D-1586 | gscsuucuCfcGfUfUfUfaucuaccas{invAb} | 1926 | usUfsgGfuAfgauaaacGfgAfgaagcsusu | 2658 |
| D-1587 | csusucucCfgUfUfUfAfucuaccaas{invAb} | 1927 | asUfsuGfgUfagauaaaCfgGfagaagsusu | 2659 |
| D-1588 | ususcuccGfuUfUfAfUfcuaccaags{invAb} | 1928 | usCfsuUfgGfuagauaaAfcGfgagaasusu | 2660 |
| D-1589 | uscsuccgUfuUfAfUfCfuaccaagas{invAb} | 1929 | asUfscUfuGfguagauaAfaCfggagasusu | 2661 |
| D-1590 | csusccguUfuAfUfCfUfaccaagags{invAb} | 1930 | asCfsuCfuUfgguagauAfaAfcggagsusu | 2662 |
| D-1591 | uscscguuUfaUfCfUfAfccaagagcs{invAb} | 1931 | asGfscUfcUfugguagaUfaAfacggasusu | 2663 |
| D-1592 | csgsuuuaUfcUfAfCfCfaagagcgcs{invAb} | 1932 | usGfscGfcUfcuugguaGfaUfaaacgsusu | 2664 |
| D-1593 | ususaucuAfcCfAfAfGfagcgcagas{invAb} | 1933 | asUfscUfgCfgcucuugGfuAfgauaasusu | 2665 |
| D-1594 | asuscuacCfaAfGfAfGfcgcagacus{invAb} | 1934 | asAfsgUfcUfgcgcucuUfgGfuagaususu | 2666 |
| D-1595 | usasccaaGfaGfCfGfCfagacuugcs{invAb} | 1935 | usGfscAfaGfucugcgcUfcUfugguasusu | 2667 |
| D-1596 | ascscaagAfgCfGfCfAfgacuugcas{invAb} | 1936 | asUfsgCfaAfgucugcgCfuCfuuggususu | 2668 |
| D-1597 | csasagagCfgCfAfGfAfcuugcaucs{invAb} | 1937 | asGfsaUfgCfaagucugCfgCfucuugsusu | 2669 |
| D-1598 | asasgagcGfcAfGfAfCfuugcauccs{invAb} | 1938 | asGfsgAfuGfcaagucuGfcGfcucuususu | 2670 |
| D-1599 | gsasgcgcAfgAfCfUfUfgcauccugs{invAb} | 1939 | asCfsaGfgAfugcaaguCfuGfcgcucsusu | 2671 |
| D-1600 | gscsgcagAfcUfUfGfCfauccugucs{invAb} | 1940 | usGfsaCfaGfgaugcaaGfuCfugcgcsusu | 2672 |
| D-1601 | csgscagaCfuUfGfCfAfuccugucas{invAb} | 1941 | asUfsgAfcAfggaugcaAfgUfcugcgsusu | 2673 |
| D-1602 | csasgacuUfgCfAfUfCfcugucacus{invAb} | 1942 | usAfsgUfgAfcaggaugCfaAfgucugsusu | 2674 |
| D-1603 | csusugcaUfcCfUfGfUfcacuaccas{invAb} | 1943 | asUfsgGfuAfgugacagGfaUfgcaagsusu | 2675 |
| D-1604 | csasuccuGfuCfAfCfUfaccacucgs{invAb} | 1944 | asCfsgAfgUfgguagugAfcAfggaugsusu | 2676 |
| D-1605 | uscscuguCfaCfUfAfCfcacucguus{invAb} | 1945 | usAfsaCfgAfgugguagUfgAfcaggasusu | 2677 |
| D-1606 | cscsugucAfcUfAfCfCfacucguuas{invAb} | 1946 | asUfsaAfcGfagugguaGfuGfacaggsusu | 2678 |
| D-1607 | csusgucaCfuAfCfCfAfcucguuags{invAb} | 1947 | usCfsuAfaCfgagugguAfgUfgacagsusu | 2679 |
| D-1608 | usgsucacUfaCfCfAfCfucguuagas{invAb} | 1948 | asUfscUfaAfcgaguggUfaGfugacasusu | 2680 |
| D-1609 | ascsuaccAfcUfCfGfUfuagagaaas{invAb} | 1949 | asUfsuUfcUfcuaacgaGfuGfguagususu | 2681 |
| D-1610 | asasgaguGfgGfUfGfGfgcuggaags{invAb} | 1950 | usCfsuUfcCfagcccacCfcAfcucuususu | 2682 |
| D-1611 | uscscuagAfaUfGfUfGfuuauugccs{invAb} | 1951 | asGfsgCfaAfuaacacaUfuCfuaggasusu | 2683 |
| D-1612 | cscsuagaAfuGfUfGfUfuauugcccs{invAb} | 1952 | asGfsgGfcAfauaacacAfuUfcuaggsusu | 2684 |
| D-1613 | asasugugUfuAfUfUfGfccccuguus{invAb} | 1953 | asAfsaCfaGfgggcaauAfaCfacauususu | 2685 |
| D-1614 | gsusguuaUfuGfCfCfCfcuguucaus{invAb} | 1954 | asAfsuGfaAfcaggggcAfaUfaacacsusu | 2686 |
| D-1615 | ususauugCfcCfCfUfGfuucaugags{invAb} | 1955 | asCfsuCfaUfgaacaggGfgCfaauaasusu | 2687 |
| D-1616 | asusugccCfcUfGfUfUfcaugaggus{invAb} | 1956 | usAfscCfuCfaugaacaGfgGfgcaaususu | 2688 |
| D-1617 | asasugaaAfaUfUfAfAfauugcaccs{invAb} | 1957 | asGfsgUfgCfaauuuaaUfuUfucauususu | 2689 |
| D-1618 | asusgaaaAfuUfAfAfAfuugcacccs{invAb} | 1958 | asGfsgGfuGfcaauuuaAfuUfuucaususu | 2690 |
| D-1619 | asasauuaAfaUfUfGfCfaccccaaas{invAb} | 1959 | asUfsuUfgGfggugcaaUfuUfaauuususu | 2691 |
| D-1620 | asusuaaaUfuGfCfAfCfcccaaauas{invAb} | 1960 | asUfsaUfuUfggggugcAfaUfuuaaususu | 2692 |
| D-1621 | ususaaauUfgCfAfCfCfccaaauaus{invAb} | 1961 | asAfsuAfuUfuggggugCfaAfuuuaasusu | 2693 |
| D-1622 | asasuugcAfcCfCfCfAfaauauggcs{invAb} | 1962 | asGfscCfaUfauuugggGfuGfcaauususu | 2694 |
| D-1623 | asusugcaCfcCfCfAfAfauauggcus{invAb} | 1963 | asAfsgCfcAfuauuuggGfgUfgcaaususu | 2695 |
| D-1624 | asusauggCfuGfGfAfAfugccacuus{invAb} | 1964 | asAfsaGfuGfgcauuccAfgCfcauaususu | 2696 |
| D-1625 | usgsgaauGfcCfAfCfUfucccuuuus{invAb} | 1965 | asAfsaAfaGfggaagugGfcAfuuccasusu | 2697 |
| D-1626 | ususcccuUfuUfCfUfUfcucaagccs{invAb} | 1966 | asGfsgCfuUfgagaagaAfaAfgggaasusu | 2698 |
| D-1627 | uscsuucuCfaAfGfCfCfccgggcuas{invAb} | 1967 | asUfsaGfcCfcggggcuUfgAfgaagasusu | 2699 |
| D-1628 | uscsucaaGfcCfCfCfGfggcuagcus{invAb} | 1968 | asAfsgCfuAfgcccgggGfcUfugagasusu | 2700 |
| D-1629 | gscsuuuuGfaAfAfUfGfgcauaaags{invAb} | 1969 | usCfsuUfuAfugccauuUfcAfaaagcsusu | 2701 |
| D-1630 | ususugaaAfuGfGfCfAfuaaagacus{invAb} | 1970 | asAfsgUfcUfuuaugccAfuUfucaaasusu | 2702 |
| D-1631 | asasuggcAfuAfAfAfGfacugaggus{invAb} | 1971 | asAfscCfuCfagucuuuAfuGfccauususu | 2703 |
| D-1632 | usgsgcauAfaAfGfAfCfugaggugas{invAb} | 1972 | asUfscAfcCfucagucuUfuAfugccasusu | 2704 |
| D-1633 | gscsauaaAfgAfCfUfGfaggugaccs{invAb} | 1973 | asGfsgUfcAfccucaguCfuUfuaugcsusu | 2705 |
| D-1634 | gsasagcaCfuGfCfAfGfauauuaaus{invAb} | 1974 | asAfsuUfaAfuaucugcAfgUfgcuucsusu | 2706 |
| D-1635 | csusaaagGfuGfCfUfCfaggaggaus{invAb} | 1975 | asAfsuCfcUfccugagcAfcCfuuuagsusu | 2707 |
| D-1636 | asgsgugcUfcAfGfGfAfggaugguus{invAb} | 1976 | asAfsaCfcAfuccuccuGfaGfcaccususu | 2708 |
| D-1637 | gsusgcucAfgGfAfGfGfaugguugus{invAb} | 1977 | asAfscAfaCfcauccucCfuGfagcacsusu | 2709 |
| D-1638 | gsasggauGfgUfUfGfUfguagucaus{invAb} | 1978 | asAfsuGfaCfuacacaaCfcAfuccucsusu | 2710 |
| D-1639 | asgsgaugGfuUfGfUfGfuagucaugs{invAb} | 1979 | asCfsaUfgAfcuacacaAfcCfauccususu | 2711 |
| D-1640 | gsgsauggUfuGfUfGfUfagucauggs{invAb} | 1980 | usCfscAfuGfacuacacAfaCfcauccsusu | 2712 |
| D-1641 | ususguguAfgUfCfAfUfggaggaccs{invAb} | 1981 | asGfsgUfcCfuccaugaCfuAfcacaasusu | 2713 |
| D-1642 | uscsauggAfgGfAfCfCfccuggaucs{invAb} | 1982 | asGfsaUfcCfaggggucCfuCfcaugasusu | 2714 |
| D-1643 | asusucccCfuCfAfGfCfuaaugacgs{invAb} | 1983 | asCfsgUfcAfuuagcugAfgGfggaaususu | 2715 |
| D-1644 | ususccccUfcAfGfCfUfaaugacggs{invAb} | 1984 | usCfscGfuCfauuagcuGfaGfgggaasusu | 2716 |
| D-1645 | uscscccuCfaGfCfUfAfaugacggas{invAb} | 1985 | asUfscCfgUfcauuagcUfgAfggggasusu | 2717 |
| D-1646 | uscsagcuAfaUfGfAfCfggagugcus{invAb} | 1986 | asAfsgCfaCfuccgucaUfuAfgcugasusu | 2718 |
| D-1647 | gsasaaaaGfuUfCfUfGfaauucugus{invAb} | 1987 | asAfscAfgAfauucagaAfcUfuuuucsusu | 2719 |
| D-1648 | asgsuucuGfaAfUfUfCfuguggaggs{invAb} | 1988 | usCfscUfcCfacagaauUfcAfgaacususu | 2720 |
| D-1649 | asgsugauUfuCfAfGfAfuagacuacs{invAb} | 1989 | asGfsuAfgUfcuaucugAfaAfucacususu | 2721 |
| D-1650 | asusuucaGfaUfAfGfAfcuacugaas{invAb} | 1990 | usUfsuCfaGfuagucuaUfcUfgaaaususu | 2722 |
| D-1651 | csasgauaGfaCfUfAfCfugaaaaccs{invAb} | 1991 | asGfsgUfuUfucaguagUfcUfaucugsusu | 2723 |
| D-1652 | usasgacuAfcUfGfAfAfaaccuuuas{invAb} | 1992 | usUfsaAfaGfguuuucaGfuAfgucuasusu | 2724 |
| D-1653 | asgsacuaCfuGfAfAfAfaccuuuaas{invAb} | 1993 | usUfsuAfaAfgguuuucAfgUfagucususu | 2725 |
| D-1654 | asasggaaAfgCfAfUfAfugucaguus{invAb} | 1994 | asAfsaCfuGfacauaugCfuUfuccuususu | 2726 |
| D-1655 | asgsgaaaGfcAfUfAfUfgucaguugs{invAb} | 1995 | asCfsaAfcUfgacauauGfcUfuuccususu | 2727 |
| D-1656 | gsgsaaagCfaUfAfUfGfucaguugus{invAb} | 1996 | asAfscAfaCfugacauaUfgCfuuuccsusu | 2728 |
| D-1657 | asasagcaUfaUfGfUfCfaguuguuus{invAb} | 1997 | usAfsaAfcAfacugacaUfaUfgcuuususu | 2729 |
| D-1658 | asasgcauAfuGfUfCfAfguuguuuas{invAb} | 1998 | usUfsaAfaCfaacugacAfuAfugcuususu | 2730 |
| D-1659 | asgscauaUfgUfCfAfGfuuguuuaas{invAb} | 1999 | usUfsuAfaAfcaacugaCfaUfaugcususu | 2731 |
| D-1660 | usasaaacCfcAfAfUfAfucuauuuus{invAb} | 2000 | asAfsaAfaUfagauauuGfgGfuuuuasusu | 2732 |
| D-1661 | asascccaAfuAfUfCfUfauuuuuuas{invAb} | 2001 | usUfsaAfaAfaauagauAfuUfggguususu | 2733 |
| D-1662 | ususaacuGfaUfUfGfUfauaacucus{invAb} | 2002 | usAfsgAfgUfuauacaaUfcAfguuaasusu | 2734 |
| D-1663 | usasacugAfuUfGfUfAfuaacucuas{invAb} | 2003 | usUfsaGfaGfuuauacaAfuCfaguuasusu | 2735 |
| D-1664 | ascsugauUfgUfAfUfAfacucuaags{invAb} | 2004 | usCfsuUfaGfaguuauaCfaAfucagususu | 2736 |
| D-1665 | csusgauuGfuAfUfAfAfcucuaagas{invAb} | 2005 | asUfscUfuAfgaguuauAfcAfaucagsusu | 2737 |
| D-1666 | gsasuuguAfuAfAfCfUfcuaagaucs{invAb} | 2006 | asGfsaUfcUfuagaguuAfuAfcaaucsusu | 2738 |
| D-1667 | gscscauuUfuGfUfCfCfuuugauuas{invAb} | 2007 | asUfsaAfuCfaaaggacAfaAfauggcsusu | 2739 |
| D-1668 | usgsuccuUfuGfAfUfUfauauugggs{invAb} | 2008 | usCfscCfaAfuauaaucAfaAfggacasusu | 2740 |
| D-2000 | [GalNAc3]saggcccAfaUfAfUfUfguaauuucs{invAb} | 2009 | usGfsaaauUfacaauaUfuGfggccususu | 2741 |
| D-2001 | [GalNAc3]scagaacGfaAfAfGfUfuauauggas{invAb} | 2010 | usUfsccauAfuaacuuUfcGfuucugsusu | 2742 |
| D-2002 | [GalNAc3]suuccagAfuGfCfAfUfuuuaaccas{invAb} | 2011 | asUfsgguuAfaaaugcAfuCfuggaasusu | 2743 |
| D-2003 | [GalNAc3]sugcauuUfuAfAfCfCfacaguggas{invAb} | 2012 | asUfsccacUfgugguuAfaAfaugcasusu | 2744 |
| D-2004 | [GalNAc3]sccagugGfaUfAfAfCfcagcuuccs{invAb} | 2013 | asGfsgaagCfugguuaUfcCfacuggsusu | 2745 |
| D-2005 | [GalNAc3]sgcuggaAfaCfAfCfUfgaagaguus{invAb} | 2014 | usAfsacucUfucagugUfuUfccagcsusu | 2746 |
| D-2006 | [GalNAc3]sgaaacaCfuGfAfAfGfaguuaucgs{invAb} | 2015 | asCfsgauaAfcucuucAfgUfguuucsusu | 2747 |
| D-2007 | [GalNAc3]saacacuGfaAfGfAfGfuuaucgccs{invAb} | 2016 | usGfsgcgaUfaacucuUfcAfguguususu | 2748 |
| D-2008 | [GalNAc3]scccguuUfaAfCfUfGfauuauggas{invAb} | 2017 | usUfsccauAfaucaguUfaAfacgggsusu | 2749 |
| D-2009 | [GalNAc3]saaaugaCfaAfCfAfCfuugaagcas{invAb} | 2018 | asUfsgcuuCfaaguguUfgUfcauuususu | 2750 |
| D-2010 | [GalNAc3]scacuugAfaGfCfAfUfgguguuucs{invAb} | 2019 | usGfsaaacAfccaugcUfuCfaagugsusu | 2751 |
| D-2011 | [GalNAc3]sgauuauGfgAfAfUfAfguucuuucs{invAb} | 2020 | asGfsaaagAfacuauuCfcAfuaaucsusu | 2752 |
| D-2012 | [GalNAc3]sauuaugGfaAfUfAfGfuucuuucus{invAb} | 2021 | asAfsgaaaGfaacuauUfcCfauaaususu | 2753 |
| D-2013 | [GalNAc3]sugguguCfuCfAfAfUfgcuucaaus{invAb} | 2022 | asAfsuugaAfgcauugAfgAfcaccasusu | 2754 |
| D-2014 | [GalNAc3]sgacaagAfcAfGfGfAfuucugaaas{invAb} | 2023 | usUfsuucaGfaauccuGfuCfuugucsusu | 2755 |
| D-2015 | [GalNAc3]scauaugUfcAfGfUfUfguuuaaaas{invAb} | 2024 | asUfsuuuaAfacaacuGfaCfauaugsusu | 2756 |
| D-2016 | [GalNAc3]saguuguUfuAfAfAfAfcccaauaus{invAb} | 2025 | asAfsuauuGfgguuuuAfaAfcaacususu | 2757 |
| D-2017 | [GalNAc3]suuguuuAfaAfAfCfCfcaauaucus{invAb} | 2026 | usAfsgauaUfuggguuUfuAfaacaasusu | 2758 |
| D-2018 | [GalNAc3]sgaugaaGfuAfUfAfUfuuuuuauus{invAb} | 2027 | asAfsauaaAfaaauauAfcUfucaucsusu | 2759 |
| D-2019 | [GalNAc3]suuuuauUfgCfCfAfUfuuuguccus{invAb} | 2028 | asAfsggacAfaaauggCfaAfuaaaasusu | 2760 |
| D-2020 | [GalNAc3]sauugccAfuUfUfUfGfuccuuugas{invAb} | 2029 | asUfscaaaGfgacaaaAfuGfgcaaususu | 2761 |
| D-2021 | [GalNAc3]sauauugGfgAfAfGfUfugacuaaas{invAb} | 2030 | asUfsuuagUfcaacuuCfcCfaauaususu | 2762 |
| D-2022 | [GalNAc3]sggaaguUfgAfCfUfAfaacuugaas{invAb} | 2031 | usUfsucaaGfuuuaguCfaAfcuuccsusu | 2763 |
| D-2023 | [GalNAc3]sacugugAfaUfAfAfAfuggaagcus{invAb} | 2032 | usAfsgcuuCfcauuuaUfuCfacagususu | 2764 |
| D-2024 | [GalNAc3]scagauuGfcUfUfAfCfucagacacs{invAb} | 2033 | asGfsugucUfgaguaaGfcAfaucugsusu | 2765 |
| D-2025 | [GalNAc3]scugaagAfgUfUfAfUfcgccagugs{invAb} | 2034 | asCfsacugGfcgauaaCfuCfuucagsusu | 2766 |
| D-2026 | [GalNAc3]sacccuuCfaGfAfAfCfgaaaguuas{invAb} | 2035 | asUfsaacuUfucguucUfgAfagggususu | 2767 |
| D-2027 | [GalNAc3]sgugaccCfuUfCfAfGfaacgaaags{invAb} | 2036 | asCfsuuucGfuucugaAfgGfgucacsusu | 2768 |
| D-2028 | [GalNAc3]sucagaaCfgAfAfAfGfuuauauggs{invAb} | 2037 | usCfscauaUfaacuuuCfgUfucugasusu | 2769 |
| D-2029 | [GalNAc3]suucuuaUfuGfGfUfGfacguggaas{invAb} | 2038 | asUfsuccaCfgucaccAfaUfaagaasusu | 2770 |
| D-2030 | [GalNAc3]saguuauAfuGfGfAfAfaaucaccas{invAb} | 2039 | asUfsggugAfuuuuccAfuAfuaacususu | 2771 |
| D-2031 | [GalNAc3]scccuucAfgAfAfCfGfaaaguuaus{invAb} | 2040 | usAfsuaacUfuucguuCfuGfaagggsusu | 2772 |
| D-2032 | [GalNAc3]sccuucaGfaAfCfGfAfaaguuauas{invAb} | 2041 | asUfsauaaCfuuucguUfcUfgaaggsusu | 2773 |
| D-2033 | [GalNAc3]scuucagAfaCfGfAfAfaguuauaus{invAb} | 2042 | asAfsuauaAfcuuucgUfuCfugaagsusu | 2774 |
| D-2034 | [GalNAc3]scaacuuCfaGfGfCfCfcaauauugs{invAb} | 2043 | asCfsaauaUfugggccUfgAfaguugsusu | 2775 |
| D-2035 | [GalNAc3]sggaaacAfcUfGfAfAfgaguuaucs{invAb} | 2044 | asGfsauaaCfucuucaGfuGfuuuccsusu | 2776 |
| D-2036 | [GalNAc3]sacuucaGfgCfCfCfAfauauuguas{invAb} | 2045 | usUfsacaaUfauugggCfcUfgaagususu | 2777 |
| D-2037 | [GalNAc3]saaguuaAfaGfCfAfAfccaacuucs{invAb} | 2046 | usGfsaaguUfgguugcUfuUfaacuususu | 2778 |
| D-2038 | [GalNAc3]scuucagGfcCfCfAfAfuauuguaas{invAb} | 2047 | asUfsuacaAfuauuggGfcCfugaagsusu | 2779 |
| D-2039 | [GalNAc3]sgaccagAfuUfGfCfUfuacucagas{invAb} | 2048 | asUfscugaGfuaagcaAfuCfuggucsusu | 2780 |
| D-2040 | [GalNAc3]sacugauUfaUfGfGfAfauaguucus{invAb} | 2049 | asAfsgaacUfauuccaUfaAfucagususu | 2781 |
| D-2041 | [GalNAc3]sauauggAfaAfAfUfCfaccacucus{invAb} | 2050 | asAfsgaguGfgugauuUfuCfcauaususu | 2782 |
| D-2042 | [GalNAc3]scaaugcUfuCfAfAfUfgucccagus{invAb} | 2051 | asAfscuggGfacauugAfaGfcauugsusu | 2783 |
| D-2043 | [GalNAc3]sugcuucAfaUfGfUfCfccagugcas{invAb} | 2052 | usUfsgcacUfgggacaUfuGfaagcasusu | 2784 |
| D-2044 | [GalNAc3]saaugacAfaGfAfCfAfggauucugs{invAb} | 2053 | usCfsagaaUfccugucUfuGfucauususu | 2785 |
| D-2045 | [GalNAc3]scuaagaUfcUfGfAfUfgaaguauas{invAb} | 2054 | asUfsauacUfucaucaGfaUfcuuagsusu | 2786 |
| D-2046 | [GalNAc3]scuggugUfcUfCfAfAfugcuucaas{invAb} | 2055 | asUfsugaaGfcauugaGfaCfaccagsusu | 2787 |
| D-2047 | [GalNAc3]sugucucAfaUfGfCfUfucaaugucs{invAb} | 2056 | asGfsacauUfgaagcaUfuGfagacasusu | 2788 |
| D-2048 | [GalNAc3]suuuuccAfuAfGfAfUfcuggaucus{invAb} | 2057 | asAfsgaucCfagaucuAfuGfgaaaasusu | 2789 |
| D-2049 | [GalNAc3]sugugacCfcUfUfCfAfgaacgaaas{invAb} | 2058 | asUfsuucgUfucugaaGfgGfucacasusu | 2790 |
| D-2050 | [GalNAc3]scaguguGfaCfCfCfUfucagaacgs{invAb} | 2059 | usCfsguucUfgaagggUfcAfcacugsusu | 2791 |
| D-2051 | [GalNAc3]scaccccAfaAfUfAfUfggcuggaas{invAb} | 2060 | asUfsuccaGfccauauUfuGfgggugsusu | 2792 |
| D-2052 | [GalNAc3]scucaauGfcUfUfCfAfaugucccas{invAb} | 2061 | asUfsgggaCfauugaaGfcAfuugagsusu | 2793 |
| D-2053 | [GalNAc3]sacaggaUfuCfUfGfAfaaacucccs{invAb} | 2062 | asGfsggagUfuuucagAfaUfccugususu | 2794 |
| D-2054 | [GalNAc3]sggauccUfuGfCfCfAfuuccccucs{invAb} | 2063 | usGfsagggGfaauggcAfaGfgauccsusu | 2795 |
| D-2055 | [GalNAc3]scugcagAfuAfUfUfAfauuuuccas{invAb} | 2064 | asUfsggaaAfauuaauAfuCfugcagsusu | 2796 |
| D-2056 | [GalNAc3]saagaucUfgAfUfGfAfaguauauus{invAb} | 2065 | asAfsauauAfcuucauCfaGfaucuususu | 2797 |
| D-2057 | [GalNAc3]saauagcAfgAfCfUfUfguuccgacs{invAb} | 2066 | asGfsucggAfacaaguCfuGfcuauususu | 2798 |
| D-2058 | [GalNAc3]sgacaacAfcUfUfGfAfagcauggus{invAb} | 2067 | asAfsccauGfcuucaaGfuGfuugucsusu | 2799 |
| D-2059 | [GalNAc3]sucagacAfgCfAfUfUfggauuuccs{invAb} | 2068 | asGfsgaaaUfccaaugCfuGfucugasusu | 2800 |
| D-2060 | [GalNAc3]suggaaaAfuCfAfCfCfacucuuugs{invAb} | 2069 | asCfsaaagAfguggugAfuUfuuccasusu | 2801 |
| D-2061 | [GalNAc3]sagacagCfaUfUfGfGfauuuccuas{invAb} | 2070 | usUfsaggaAfauccaaUfgCfugucususu | 2802 |
| D-2062 | [GalNAc3]scugauuAfuGfGfAfAfuaguucuus{invAb} | 2071 | asAfsagaaCfuauuccAfuAfaucagsusu | 2803 |
| D-2063 | [GalNAc3]sguauguCfcUfGfGfAfauauuagas{invAb} | 3062 | asUfscuaaUfauuccaGfgAfcauacsusu | 3321 |
| D-2064 | [GalNAc3]saggcuaGfaGfAfAfGfaaaguuaas{invAb} | 3063 | usUfsuaacUfuucuucUfcUfagccususu | 3322 |
| D-2065 | [GalNAc3]suguauaAfcUfCfUfAfagaucugas{invAb} | 3064 | asUfscagaUfcuuagaGfuUfauacasusu | 3323 |
| D-2066 | [GalNAc3]sccguauGfuCfCfUfGfgaauauuas{invAb} | 3065 | asUfsaauaUfuccaggAfcAfuacggsusu | 3324 |
| D-2067 | [GalNAc3]scaaaaaUfgAfCfAfAfcacuugaas{invAb} | 3066 | asUfsucaaGfuguuguCfaUfuuuugsusu | 3325 |
| D-2068 | [GalNAc3]suacugaAfaAfCfCfUfuuaaagggs{invAb} | 3067 | asCfsccuuUfaaagguUfuUfcaguasusu | 3326 |
| D-2069 | [GalNAc3]sacuacuGfaAfAfAfCfcuuuaaags{invAb} | 3068 | asCfsuuuaAfagguuuUfcAfguagususu | 3327 |
| D-2070 | [GalNAc3]sagaagaAfaAfGfUfGfauucagugs{invAb} | 3069 | usCfsacugAfaucacuUfuUfcuucususu | 3328 |
| D-2071 | [GalNAc3]suuugggCfaGfUfAfUfuuugugcus{invAb} | 3070 | asAfsgcacAfaaauacUfgCfccaaasusu | 3329 |
| D-2072 | [GalNAc3]suaccaaGfaGfCfGfCfagacuugcs{invAb} | 3071 | usGfscaagUfcugcgcUfcUfugguasusu | 3330 |
| D-2073 | [GalNAc3]scgggcuAfgCfUfUfUfugaaauggs{invAb} | 3072 | asCfscauuUfcaaaagCfuAfgcccgsusu | 3331 |
| D-2074 | [GalNAc3]scuggaaAfcAfCfUfGfaagaguuas{invAb} | 3073 | asUfsaacuCfuucaguGfuUfuccagsusu | 3332 |
| D-2075 | [GalNAc3]sauguccCfaGfUfGfCfaaaaaguas{invAb} | 3074 | usUfsacuuUfuugcacUfgGfgacaususu | 3333 |
| D-2076 | [GalNAc3]scuggaaUfaUfUfAfGfaugccuuus{invAb} | 3075 | asAfsaaggCfaucuaaUfaUfuccagsusu | 3334 |
| D-2077 | [GalNAc3]sccuggaAfuAfUfUfAfgaugccuus{invAb} | 3076 | asAfsaggcAfucuaauAfuUfccaggsusu | 3335 |
| D-2078 | [GalNAc3]succuggAfaUfAfUfUfagaugccus{invAb} | 3077 | asAfsggcaUfcuaauaUfuCfcaggasusu | 3336 |
| D-2079 | [GalNAc3]sacucuaAfgAfUfCfUfgaugaagus{invAb} | 3078 | usAfscuucAfucagauCfuUfagagususu | 3337 |
| D-2080 | [GalNAc3]sguccugGfaAfUfAfUfuagaugccs{invAb} | 3079 | asGfsgcauCfuaauauUfcCfaggacsusu | 3338 |
| D-2081 | [GalNAc3]suguccuGfgAfAfUfAfuuagaugcs{invAb} | 3080 | asGfscaucUfaauauuCfcAfggacasusu | 3339 |
| D-2082 | [GalNAc3]suaacucUfaAfGfAfUfcugaugaas{invAb} | 3081 | asUfsucauCfagaucuUfaGfaguuasusu | 3340 |
| D-2083 | [GalNAc3]sgugaugGfcUfUfGfUfuccagaugs{invAb} | 3082 | asCfsaucuGfgaacaaGfcCfaucacsusu | 3341 |
| D-2084 | [GalNAc3]sgucuauGfcAfGfAfGfgauucuugs{invAb} | 3083 | asCfsaagaAfuccucuGfcAfuagacsusu | 3342 |
| D-2085 | [GalNAc3]sacccugAfcUfCfUfCfagugcagcs{invAb} | 3084 | asGfscugcAfcugagaGfuCfagggususu | 3343 |
| D-2086 | [GalNAc3]sagccuaCfaCfAfAfAfggaccuacs{invAb} | 3085 | asGfsuaggUfccuuugUfgUfaggcususu | 3344 |
| D-2087 | [GalNAc3]saccaagAfgCfGfCfAfgacuugcas{invAb} | 3086 | asUfsgcaaGfucugcgCfuCfuuggususu | 3345 |
| D-2088 | [GalNAc3]sgaaggaAfcCfGfCfUfggaaacacs{invAb} | 3087 | asGfsuguuUfccagcgGfuUfccuucsusu | 3346 |
| D-2089 | [GalNAc3]suucccuUfuUfCfUfUfcucaagccs{invAb} | 3088 | asGfsgcuuGfagaagaAfaAfgggaasusu | 3347 |
| D-2090 | [GalNAc3]sccugucAfcUfAfCfCfacucguuas{invAb} | 3089 | asUfsaacgAfgugguaGfuGfacaggsusu | 3348 |
| D-2091 | [GalNAc3]scgcgcuUfuGfUfCfCfuccucgcgs{invAb} | 3090 | asCfsgcgaGfgaggacAfaAfgcgcgsusu | 3349 |
| D-2092 | [GalNAc3]sgaaacaUfgGfUfUfAfcugcucgcs{invAb} | 3091 | asGfscgagCfaguaacCfaUfguuucsusu | 3350 |
| D-2093 | [GalNAc3]scuuuguCfcUfCfCfUfcgcgcaaus{invAb} | 3092 | asAfsuugcGfcgaggaGfgAfcaaagsusu | 3351 |
| D-2094 | [GalNAc3]sgcauaaAfgAfCfUfGfaggugaccs{invAb} | 3093 | asGfsgucaCfcucaguCfuUfuaugcsusu | 3352 |
| D-2095 | [GalNAc3]suuugucCfuCfCfUfCfgcgcaaucs{invAb} | 3094 | asGfsauugCfgcgaggAfgGfacaaasusu | 3353 |
| D-2096 | [GalNAc3]sgaaaagGfgUfGfAfUfggcuuguus{invAb} | 3095 | asAfsacaaGfccaucaCfcCfuuuucsusu | 3354 |
| D-2097 | [GalNAc3]saaaaggGfuGfAfUfGfgcuuguucs{invAb} | 3096 | asGfsaacaAfgccaucAfcCfcuuuususu | 3355 |
| D-2098 | [GalNAc3]scuacugCfcUfAfUfCfaaaacgccs{invAb} | 3097 | asGfsgcguUfuugauaGfgCfaguagsusu | 3356 |
| D-2099 | [GalNAc3]scucaucAfaAfUfAfGfcagacuugs{invAb} | 3098 | asCfsaaguCfugcuauUfuGfaugagsusu | 3357 |
| D-2100 | [GalNAc3]sagacacCfaGfCfCfCfauucuugas{invAb} | 3099 | asUfscaagAfaugggcUfgGfugucususu | 3358 |
| D-2101 | [GalNAc3]scagcccAfuUfCfUfUfgauccuuus{invAb} | 3100 | asAfsaaggAfucaagaAfuGfggcugsusu | 3359 |
| D-2102 | [GalNAc3]sgcagagGfaUfUfCfUfugggaugas{invAb} | 3101 | asUfscaucCfcaagaaUfcCfucugcsusu | 3360 |
| D-2103 | [GalNAc3]scuaaagGfuGfCfUfCfaggaggaus{invAb} | 3102 | asAfsuccuCfcugagcAfcCfuuuagsusu | 3361 |
| D-2104 | [GalNAc3]saaagcaUfaUfGfUfCfaguuguuus{invAb} | 3103 | usAfsaacaAfcugacaUfaUfgcuuususu | 3362 |
| D-2105 | [GalNAc3]suuaacuGfaUfUfGfUfauaacucus{invAb} | 3104 | usAfsgaguUfauacaaUfcAfguuaasusu | 3363 |
| D-2106 | [GalNAc3]suaacugAfuUfGfUfAfuaacucuas{invAb} | 3105 | usUfsagagUfuauacaAfuCfaguuasusu | 3364 |
| D-2107 | [GalNAc3]sugaaaaCfuCfCfCfCfguuuaacus{invAb} | 3106 | asAfsguuaAfacggggAfgUfuuucasusu | 3365 |
| D-2108 | [GalNAc3]sgaugccUfuUfUfAfAfaaauguucs{invAb} | 3107 | asGfsaacaUfuuuuaaAfaGfgcaucsusu | 3366 |
| D-2109 | [GalNAc3]saaguugAfcUfAfAfAfcuugaaaas{invAb} | 3108 | usUfsuuucAfaguuuaGfuCfaacuususu | 3367 |
| D-2110 | [GalNAc3]scacaaaGfgAfCfCfUfacuacugcs{invAb} | 3109 | asGfscaguAfguagguCfcUfuugugsusu | 3368 |
| D-2111 | [GalNAc3]sgauuuuCfaCfAfUfUfuuucgucus{invAb} | 3110 | asAfsgacgAfaaaaugUfgAfaaaucsusu | 3369 |
| D-2112 | [GalNAc3]sccauucUfuGfAfUfCfcuuucugas{invAb} | 3111 | asUfscagaAfaggaucAfaGfaauggsusu | 3370 |
| D-2113 | [GalNAc3]sgaauauUfaGfAfUfGfccuuuuaas{invAb} | 3112 | usUfsuaaaAfggcaucUfaAfuauucsusu | 3371 |
| D-2114 | [GalNAc3]saaggaaAfgCfAfUfAfugucaguus{invAb} | 3113 | asAfsacugAfcauaugCfuUfuccuususu | 3372 |
| D-2115 | [GalNAc3]saggaaaGfcAfUfAfUfgucaguugs{invAb} | 3114 | asCfsaacuGfacauauGfcUfuuccususu | 3373 |
| D-2116 | [GalNAc3]sccccguUfuAfAfCfUfgauuauggs{invAb} | 3115 | usCfscauaAfucaguuAfaAfcggggsusu | 3374 |
| D-2117 | [GalNAc3]sggaaagCfaUfAfUfGfucaguugus{invAb} | 3116 | asAfscaacUfgacauaUfgCfuuuccsusu | 3375 |
| D-2118 | [GalNAc3]sgccauuUfuGfUfCfCfuuugauuas{invAb} | 3117 | asUfsaaucAfaaggacAfaAfauggcsusu | 3376 |
| D-2119 | [GalNAc3]saugacaAfcAfCfUfUfgaagcaugs{invAb} | 3118 | asCfsaugcUfucaaguGfuUfgucaususu | 3377 |
| D-2120 | [GalNAc3]scuccugCfuUfCfUfCfcguuuaucs{invAb} | 3119 | asGfsauaaAfcggagaAfgCfaggagsusu | 3378 |
| D-2121 | [GalNAc3]scagacuUfgCfAfUfCfcugucacus{invAb} | 3120 | usAfsgugaCfaggaugCfaAfgucugsusu | 3379 |
| D-2122 | [GalNAc3]sgagggaAfaCfAfUfGfguuacugcs{invAb} | 3121 | asGfscaguAfaccaugUfuUfcccucsusu | 3380 |
| D-2123 | [GalNAc3]suggcauAfaAfGfAfCfugaggugas{invAb} | 3122 | asUfscaccUfcagucuUfuAfugccasusu | 3381 |
| D-2124 | [GalNAc3]succuagAfaUfGfUfGfuuauugccs{invAb} | 3123 | asGfsgcaaUfaacacaUfuCfuaggasusu | 3382 |
| D-2125 | [GalNAc3]suggaaaCfaCfUfGfAfagaguuaus{invAb} | 3124 | asAfsuaacUfcuucagUfgUfuuccasusu | 3383 |
| D-2130 | [GalNAc3]suggauuUfcCfUfAfAfaggugcucs{invAb} | 3125 | usGfsagcaCfcuuuagGfaAfauccasusu | 3384 |
| D-2131 | [GalNAc3]sgaggagAfaGfAfAfAfagugauucs{invAb} | 3126 | usGfsaaucAfcuuuucUfuCfuccucsusu | 3385 |
| D-2134 | [GalNAc3]saccuacUfaCfUfGfCfcuaucaaas{invAb} | 3127 | usUfsuugaUfaggcagUfaGfuaggususu | 3386 |
| D-2135 | [GalNAc3]suacuacUfgCfCfUfAfucaaaacgs{invAb} | 3128 | asCfsguuuUfgauaggCfaGfuaguasusu | 3387 |
| D-2136 | [GalNAc3]saaauauAfgUfCfUfCfaauaacuus{invAb} | 3129 | usAfsaguuAfuugagaCfuAfuauuususu | 3388 |
| D-2137 | [GalNAc3]saacucuAfaGfAfUfCfugaugaags{invAb} | 3130 | asCfsuucaUfcagaucUfuAfgaguususu | 3389 |
| D-2138 | [GalNAc3]saagaguUfaUfCfGfCfcagugugas{invAb} | 3131 | asUfscacaCfuggcgaUfaAfcucuususu | 3390 |
| D-2139 | [GalNAc3]sccgggcUfaGfCfUfUfuugaaaugs{invAb} | 3132 | asCfsauuuCfaaaagcUfaGfcccggsusu | 3391 |
| D-2140 | [GalNAc3]sguuauaUfgGfAfAfAfaucaccacs{invAb} | 3133 | asGfsugguGfauuuucCfaUfauaacsusu | 3392 |
| D-2141 | [GalNAc3]saaagugAfuUfCfAfGfugauuucas{invAb} | 3134 | asUfsgaaaUfcacugaAfuCfacuuususu | 3393 |
| D-2142 | [GalNAc3]suaugucCfuGfGfAfAfuauuagaus{invAb} | 3135 | asAfsucuaAfuauuccAfgGfacauasusu | 3394 |
| D-2143 | [GalNAc3]sauaacuCfuAfAfGfAfucugaugas{invAb} | 3136 | usUfscaucAfgaucuuAfgAfguuaususu | 3395 |
| D-2144 | [GalNAc3]scuuguuCfcAfGfAfUfgcauuuuas{invAb} | 3137 | usUfsaaaaUfgcaucuGfgAfacaagsusu | 3396 |
| D-2145 | [GalNAc3]suauugcCfaUfUfUfUfguccuuugs{invAb} | 3138 | usCfsaaagGfacaaaaUfgGfcaauasusu | 3397 |
| D-2146 | [GalNAc3]sugauuuUfcAfCfAfUfuuuucgucs{invAb} | 3139 | asGfsacgaAfaaauguGfaAfaaucasusu | 3398 |
| D-2147 | [GalNAc3]scaagagCfgCfAfGfAfcuugcaucs{invAb} | 3140 | asGfsaugcAfagucugCfgCfucuugsusu | 3399 |
| D-2148 | [GalNAc3]scagauaGfaCfUfAfCfugaaaaccs{invAb} | 3141 | asGfsguuuUfcaguagUfcUfaucugsusu | 3400 |
| D-2149 | [GalNAc3]suuauggAfaUfAfGfUfucuuucucs{invAb} | 3142 | asGfsagaaAfgaacuaUfuCfcauaasusu | 3401 |
| D-2150 | [GalNAc3]scaugguGfuUfUfCfAfgaacugags{invAb} | 3143 | usCfsucagUfucugaaAfcAfccaugsusu | 3402 |
| D-2151 | [GalNAc3]sgaagaaAfaGfUfGfAfuucagugas{invAb} | 3144 | asUfscacuGfaaucacUfuUfucuucsusu | 3403 |
| D-2152 | [GalNAc3]sgucccaGfuGfCfAfAfaaaguaaas{invAb} | 3145 | asUfsuuacUfuuuugcAfcUfgggacsusu | 3404 |
| D-2153 | [GalNAc3]sacugauUfgUfAfUfAfacucuaags{invAb} | 3146 | usCfsuuagAfguuauaCfaAfucagususu | 3405 |
| D-2154 | [GalNAc3]saccguaUfgUfCfCfUfggaauauus{invAb} | 3147 | usAfsauauUfccaggaCfaUfacggususu | 3406 |
| D-2155 | [GalNAc3]succccgUfuUfAfAfCfugauuaugs{invAb} | 3148 | asCfsauaaUfcaguuaAfaCfggggasusu | 3407 |
| D-2156 | [GalNAc3]sauauagUfcUfCfAfAfuaacuuags{invAb} | 3149 | asCfsuaagUfuauugaGfaCfuauaususu | 3408 |
| D-2157 | [GalNAc3]succcagUfgCfAfAfAfaaguaaags{invAb} | 3150 | usCfsuuuaCfuuuuugCfaCfugggasusu | 3409 |
| D-2158 | [GalNAc3]saugcuuCfaAfUfGfUfcccaguuus{invAb} | 3151 | asAfscuggGfacauugAfaGfcaususu | 3410 |
| D-2159 | [GalNAc3]sgaacgaAfaGfUfUfAfuauggaaus{invAb} | 3152 | usUfsccauAfuaacuuUfcGfuucsusu | 3411 |
| D-2160 | [GalNAc3]sgauugcUfuAfCfUfCfagacacuus{invAb} | 3153 | asGfsugucUfgaguaaGfcAfaucsusu | 3412 |
| D-2161 | [GalNAc3]scuucagGfcCfCfAfAfuauuguaas{invAb} | 2047 | asUfsuAfcAfauauuggGfcCfugaagsusu | 2212 |
| D-2162 | [GalNAc3]scaaugcUfuCfAfAfUfgucccagus{invAb} | 2051 | asAfscUfgGfgacauugAfaGfcauugsusu | 2249 |
| D-2163 | [GalNAc3]scagaacGfaAfAfGfUfuauauggas{invAb} | 2010 | usUfscCfaUfauaacuuUfcGfuucugsusu | 2168 |
| D-2164 | [GalNAc3]sggaaguUfgAfCfUfAfaacuugaas{invAb} | 2031 | usUfsuCfaAfguuuaguCfaAfcuuccsusu | 2328 |
| D-2165 | [GalNAc3]sccagugGfaUfAfAfCfcagcuuccs{invAb} | 2013 | asGfsgAfaGfcugguuaUfcCfacuggsusu | 2116 |
| D-2166 | [GalNAc3]scuaagaUfcUfGfAfUfgaaguauas{invAb} | 2054 | asUfsaUfaCfuucaucaGfaUfcuuagsusu | 2317 |
| D-2167 | [GalNAc3]scagauuGfcUfUfAfCfucagacacs{invAb} | 2033 | asGfsuGfuCfugaguaaGfcAfaucugsusu | 2185 |
| D-2168 | [GalNAc3]scuucaggcCfcAfAfUfAfuuguaas{invAb} | 3154 | asUfsuacaAfuauuGfgGfccugaagsusu | 3413 |
| D-2169 | [GalNAc3]scaaugcuuCfaAfUfGfUfcccagus{invAb} | 3155 | asAfscuggGfacauUfgAfagcauugsusu | 3414 |
| D-2170 | [GalNAc3]scagaacgaAfaGfUfUfAfuauggas{invAb} | 3156 | usUfsccauAfuaacUfuUfcguucugsusu | 3415 |
| D-2171 | [GalNAc3]sggaaguugAfcUfAfAfAfcuugaas{invAb} | 3157 | usUfsucaaGfuuuaGfuCfaacuuccsusu | 3416 |
| D-2172 | [GalNAc3]sccaguggaUfaAfCfCfAfgcuuccs{invAb} | 3158 | asGfsgaagCfugguUfaUfccacuggsusu | 3417 |
| D-2173 | [GalNAc3]scuaagaucUfgAfUfGfAfaguauas{invAb} | 3159 | asUfsauacUfucauCfaGfaucuuagsusu | 3418 |
| D-2174 | [GalNAc3]scagauugcUfuAfCfUfCfagacacs{invAb} | 3160 | asGfsugucUfgaguAfaGfcaaucugsusu | 3419 |
| D-2175 | [GalNAc3]scuucagGfcCfCfAfAfuauuguaas{invAb} | 2047 | asUfsuacaAfuauuggGfcCfugasasgsusg | 3420 |
| D-2176 | [GalNAc3]scaaugcUfuCfAfAfUfgucccagus{invAb} | 2051 | asAfscuggGfacauugAfaGfcaususgsusg | 3421 |
| D-2177 | [GalNAc3]scagaacGfaAfAfGfUfuauauggas{invAb} | 2010 | usUfsccauAfuaacuuUfcGfuucsusgsusg | 3422 |
| D-2178 | [GalNAc3]sggaaguUfgAfCfUfAfaacuugaas{invAb} | 2031 | usUfsucaaGfuuuaguCfaAfcuuscscsusg | 3423 |
| D-2179 | [GalNAc3]sccagugGfaUfAfAfCfcagcuuccs{invAb} | 2013 | asGfsgaagCfugguuaUfcCfacusgsgsusg | 3424 |
| D-2180 | [GalNAc3]scuaagaUfcUfGfAfUfgaaguauas{invAb} | 2054 | asUfsauacUfucaucaGfaUfcuusasgsusg | 3425 |
| D-2181 | [GalNAc3]scagauuGfcUfUfAfCfucagacacs{invAb} | 2033 | asGfsugucUfgaguaaGfcAfaucsusgsusg | 3426 |
| D-2182 | [GalNAc3]scaaugcUfuCfAfAfUfgucccagus{invAb} | 2051 | asAfscuggGfacauugAfaGfcauugsasg | 3427 |
| D-2183 | [GalNAc3]scaaugcUfuCfaAfugucccagus{invAb} | 3161 | asAfscugggacauUfgAfaGfcauugsusu | 3428 |
| D-2184 | [GalNAc3]scaaugcUfuCfAfAfUfgucccagus{invAb} | 2051 | asAfscUfggGfacauugAfaGfcauugsusu | 3429 |
| D-2185 | [GalNAc3]scaaugcUfuCfAfAfUfgucccagus{invAb} | 2051 | asAfscugGfGfacauugAfaGfcauugsusu | 3430 |
| D-2186 | [GalNAc3]scaaugcUfuCfAfAfUfgucccagus{invAb} | 2051 | asAfscuggGfacauUfgAfaGfcauugsusu | 3431 |
| D-2187 | [GalNAc3]scaaugcUfuCfAfAfUfgucccagus{invAb} | 2051 | asAfscUfgGfGfacauugAfaGfcauugsusu | 3432 |
| D-2188 | [GalNAc3]scuucagGfcCfCfAfAfuauuguaas{invAb} | 2047 | asUfsuacaAfuauuggGfcCfugasasg | 3433 |
| D-2189 | [GalNAc3]scaaugcUfuCfAfAfUfgucccagus{invAb} | 2051 | asAfscuggGfacauugAfaGfcaususg | 3434 |
| D-2190 | [GalNAc3]scagaacGfaAfAfGfUfuauauggas{invAb} | 2010 | usUfsccauAfuaacuuUfcGfuucsusg | 3435 |
| D-2191 | [GalNAc3]sggaaguUfgAfCfUfAfaacuugaas{invAb} | 2031 | usUfsucaaGfuuuaguCfaAfcuuscsc | 3436 |
| D-2192 | [GalNAc3]sccagugGfaUfAfAfCfcagcuuccs{invAb} | 2013 | asGfsgaagCfugguuaUfcCfacusgsg | 3437 |
| D-2193 | [GalNAc3]scuaagaUfcUfGfAfUfgaaguauas{invAb} | 2054 | asUfsauacUfucaucaGfaUfcuusasg | 3438 |
| D-2194 | [GalNAc3]scagauuGfcUfUfAfCfucagacacs{invAb} | 2033 | asGfsugucUfgaguaaGfcAfaucsusg | 3439 |
| D-2195 | [GalNAc3]scaaugcUfuCfAfAfUfgucccauus{invAb} | 3162 | asUfsgggaCfauugaaGfcAfuugsusu | 3440 |
| D-2196 | [GalNAc3]sguuuaaAfaCfCfCfAfauaucuaus{invAb} | 3163 | usAfsgauaUfuggguuUfuAfaacsusu | 3441 |
| D-2197 | [GalNAc3]scuucaaUfgUfCfCfCfagugcaaus{invAb} | 3164 | usUfsgcacUfgggacaUfuGfaagsusu | 3442 |
| D-2198 | [GalNAc3]sagacagCfaUfUfGfGfauuuccuus{invAb} | 3165 | asGfsgaaaUfccaaugCfuGfucususu | 3443 |
| D-2199 | [GalNAc3]sgaaaauCfaCfCfAfCfucuuuguus{invAb} | 3166 | asCfsaaagAfguggugAfuUfuucsusu | 3444 |
| D-2200 | [GalNAc3]sacagcaUfuGfGfAfUfuuccuaaus{invAb} | 3167 | usUfsaggaAfauccaaUfgCfugususu | 3445 |
| D-2201 | [GalNAc3]saggauuCfuGfAfAfAfacucccuus{invAb} | 3168 | asGfsggagUfuuucagAfaUfccususu | 3446 |
| D-2202 | [GalNAc3]scaacacUfuGfAfAfGfcaugguuus{invAb} | 3169 | asAfsccauGfcuucaaGfuGfuugsusu | 3447 |
| D-2203 | [GalNAc3]scucaaugcUfuCfAfAfUfgucccas{invAb} | 3170 | asUfsgggaCfauugAfaGfcauugagsusu | 3448 |
| D-2204 | [GalNAc3]suuguuuaaAfaCfCfCfAfauaucus{invAb} | 3171 | usAfsgauaUfugggUfuUfuaaacaasusu | 3449 |
| D-2205 | [GalNAc3]sugcuucaaUfgUfCfCfCfagugcas{invAb} | 3172 | usUfsgcacUfgggaCfaUfugaagcasusu | 3450 |
| D-2206 | [GalNAc3]sucagacagCfaUfUfGfGfauuuccs{invAb} | 3173 | asGfsgaaaUfccaaUfgCfugucugasusu | 3451 |
| D-2207 | [GalNAc3]suggaaaauCfaCfCfAfCfucuuugs{invAb} | 3174 | asCfsaaagAfguggUfgAfuuuuccasusu | 3452 |
| D-2208 | [GalNAc3]sagacagcaUfuGfGfAfUfuuccuas{invAb} | 3175 | usUfsaggaAfauccAfaUfgcugucususu | 3453 |
| D-2209 | [GalNAc3]sacaggauuCfuGfAfAfAfacucccs{invAb} | 3176 | asGfsggagUfuuucAfgAfauccugususu | 3454 |
| D-2210 | [GalNAc3]sgacaacacUfuGfAfAfGfcauggus{invAb} | 3177 | asAfsccauGfcuucAfaGfuguugucsusu | 3455 |
| D-2211 | [GalNAc3]scucaauGfcUfUfCfAfaugucccas{invAb} | 2061 | asUfsgGfgAfcauugaaGfcAfuugagsusu | 2248 |
| D-2212 | [GalNAc3]suuguuuAfaAfAfCfCfcaauaucus{invAb} | 2026 | usAfsgAfuAfuuggguuUfuAfaacaasusu | 2315 |
| D-2213 | [GalNAc3]sugcuucAfaUfGfUfCfccagugcas{invAb} | 2052 | usUfsgCfaCfugggacaUfuGfaagcasusu | 2251 |
| D-2214 | [GalNAc3]sucagacAfgCfAfUfUfggauuuccs{invAb} | 2068 | asGfsgAfaAfuccaaugCfuGfucugasusu | 2285 |
| D-2215 | [GalNAc3]suggaaaAfuCfAfCfCfacucuuugs{invAb} | 2069 | asCfsaAfaGfaguggugAfuUfuuccasusu | 2222 |
| D-2216 | [GalNAc3]sagacagCfaUfUfGfGfauuuccuas{invAb} | 2070 | usUfsaGfgAfaauccaaUfgCfugucususu | 2287 |
| D-2217 | [GalNAc3]sacaggaUfuCfUfGfAfaaacucccs{invAb} | 2062 | asGfsgGfaGfuuuucagAfaUfccugususu | 2256 |
| D-2218 | [GalNAc3]sgacaacAfcUfUfGfAfagcauggus{invAb} | 2067 | asAfscCfaUfgcuucaaGfuGfuugucsusu | 2238 |
| D-2219 | [GalNAc3]scucaauGfcUfUfCfAfaugucccas{invAb} | 2061 | asUfsgggaCfauugaaGfcAfuugsasg | 3456 |
| D-2220 | [GalNAc3]suuguuuAfaAfAfCfCfcaauaucus{invAb} | 2026 | usAfsgauaUfuggguuUfuAfaacsasa | 3457 |
| D-2221 | [GalNAc3]sugcuucAfaUfGfUfCfccagugcas{invAb} | 2052 | usUfsgcacUfgggacaUfuGfaagscsa | 3458 |
| D-2222 | [GalNAc3]sucagacAfgCfAfUfUfggauuuccs{invAb} | 2068 | asGfsgaaaUfccaaugCfuGfucusgsa | 3459 |
| D-2223 | [GalNAc3]suggaaaAfuCfAfCfCfacucuuugs{invAb} | 2069 | asCfsaaagAfguggugAfuUfuucscsa | 3460 |
| D-2224 | [GalNAc3]sagacagCfaUfUfGfGfauuuccuas{invAb} | 2070 | usUfsaggaAfauccaaUfgCfuguscsu | 3461 |
| D-2225 | [GalNAc3]sacaggaUfuCfUfGfAfaaacucccs{invAb} | 2062 | asGfsggagUfuuucagAfaUfccusgsu | 3462 |
| D-2226 | [GalNAc3]sgacaacAfcUfUfGfAfagcauggus{invAb} | 2067 | asAfsccauGfcuucaaGfuGfuugsusc | 3463 |
| D-2227 | [GalNAc3]sucagaaCfgAfAfAfGfuuauauggs{invAb} | 2037 | usCfscAfuAfuaacuuuCfgUfucugasusu | 2167 |
| D-2228 | [GalNAc3]suuccagAfuGfCfAfUfuuuaaccas{invAb} | 2011 | asUfsgGfuUfaaaaugcAfuCfuggaasusu | 2133 |
| D-2229 | [GalNAc3]sccuucaGfaAfCfGfAfaaguuauas{invAb} | 2041 | asUfsaUfaAfcuuucguUfcUfgaaggsusu | 2164 |
| D-2230 | [GalNAc3]scuucagAfaCfGfAfAfaguuauaus{invAb} | 2042 | asAfsuAfuAfacuuucgUfuCfugaagsusu | 2165 |
| D-2231 | [GalNAc3]scaacuuCfaGfGfCfCfcaauauugs{invAb} | 2043 | asCfsaAfuAfuugggccUfgAfaguugsusu | 2210 |
| D-2232 | [GalNAc3]sacuucaGfgCfCfCfAfauauuguas{invAb} | 2045 | usUfsaCfaAfuauugggCfcUfgaagususu | 2211 |
| D-2233 | [GalNAc3]scuguuuAfaAfAfCfCfcaauaucus{invAb} | 3178 | usAfsgauaUfuggguuUfuAfaacagsusu | 3464 |
| D-2234 | [GalNAc3]scgcuucAfaUfGfUfCfccagugcas{invAb} | 3179 | usUfsgcacUfgggacaUfuGfaagcgsusu | 3465 |
| D-2235 | [GalNAc3]sccagacAfgCfAfUfUfggauuuccs{invAb} | 3180 | asGfsgaaaUfccaaugCfuGfucuggsusu | 3466 |
| D-2236 | [GalNAc3]scggaaaAfuCfAfCfCfacucuuugs{invAb} | 3181 | asCfsaaagAfguggugAfuUfuuccgsusu | 3467 |
| D-2237 | [GalNAc3]sggacagCfaUfUfGfGfauuuccuas{invAb} | 3182 | usUfsaggaAfauccaaUfgCfuguccsusu | 3468 |
| D-2238 | [GalNAc3]sgcaggaUfuCfUfGfAfaaacucccs{invAb} | 3183 | asGfsggagUfuuucagAfaUfccugcsusu | 3469 |
| D-2239 | [GalNAc3]sgauggcUfuGfUfUfCfcagauguus{invAb} | 3184 | asCfsaucuGfgaacaaGfcCfaucsusu | 3470 |
| D-2240 | [GalNAc3]succuggAfaUfAfUfUfagaugcuus{invAb} | 3185 | asGfscaucUfaauauuCfcAfggasusu | 3471 |
| D-2241 | [GalNAc3]sccuggaAfuAfUfUfAfgaugccuus{invAb} | 3076 | asGfsgcauCfuaauauUfcCfaggsusu | 3472 |
| D-2242 | [GalNAc3]sucuaagAfuCfUfGfAfugaaguaus{invAb} | 3186 | usAfscuucAfucagauCfuUfagasusu | 3473 |
| D-2243 | [GalNAc3]scuggaaUfaUfUfAfGfaugccuuus{invAb} | 3075 | asAfsggcaUfcuaauaUfuCfcagsusu | 3474 |
| D-2244 | [GalNAc3]sgugauggcUfuGfUfUfCfcagaugs{invAb} | 3187 | asCfsaucuGfgaacAfaGfccaucacsusu | 3475 |
| D-2245 | [GalNAc3]suguccuggAfaUfAfUfUfagaugcs{invAb} | 3188 | asGfscaucUfaauaUfuCfcaggacasusu | 3476 |
| D-2246 | [GalNAc3]sguccuggaAfuAfUfUfAfgaugccs{invAb} | 3189 | asGfsgcauCfuaauAfuUfccaggacsusu | 3477 |
| D-2247 | [GalNAc3]sacucuaagAfuCfUfGfAfugaagus{invAb} | 3190 | usAfscuucAfucagAfuCfuuagagususu | 3478 |
| D-2248 | [GalNAc3]succuggaaUfaUfUfAfGfaugccus{invAb} | 3191 | asAfsggcaUfcuaaUfaUfuccaggasusu | 3479 |
| D-2249 | [GalNAc3]sgugaugGfcUfUfGfUfuccagaugs{invAb} | 3082 | asCfsaUfcUfggaacaaGfcCfaucacsusu | 2439 |
| D-2250 | [GalNAc3]suguccuGfgAfAfUfAfuuagaugcs{invAb} | 3080 | asGfscAfuCfuaauauuCfcAfggacasusu | 2458 |
| D-2251 | [GalNAc3]sguccugGfaAfUfAfUfuagaugccs{invAb} | 3079 | asGfsgCfaUfcuaauauUfcCfaggacsusu | 2459 |
| D-2252 | [GalNAc3]sacucuaAfgAfUfCfUfgaugaagus{invAb} | 3078 | usAfscUfuCfaucagauCfuUfagagususu | 2479 |
| D-2253 | [GalNAc3]succuggAfaUfAfUfUfagaugccus{invAb} | 3077 | asAfsgGfcAfucuaauaUfuCfcaggasusu | 2460 |
| D-2254 | [GalNAc3]sgugaugGfcUfUfGfUfuccagaugs{invAb} | 3082 | asCfsaucuGfgaacaaGfcCfaucsasc | 3480 |
| D-2255 | [GalNAc3]suguccuGfgAfAfUfAfuuagaugcs{invAb} | 3080 | asGfscaucUfaauauuCfcAfggascsa | 3481 |
| D-2256 | [GalNAc3]sguccugGfaAfUfAfUfuagaugccs{invAb} | 3079 | asGfsgcauCfuaauauUfcCfaggsasc | 3482 |
| D-2257 | [GalNAc3]sacucuaAfgAfUfCfUfgaugaagus{invAb} | 3078 | usAfscuucAfucagauCfuUfagasgsu | 3483 |
| D-2258 | [GalNAc3]succuggAfaUfAfUfUfagaugccus{invAb} | 3077 | asAfsggcaUfcuaauaUfuCfcagsgsa | 3484 |
| D-2259 | [GalNAc3]scccuggAfaUfAfUfUfagaugccus{invAb} | 3192 | asAfsggcaUfcuaauaUfuCfcagggsusu | 3485 |
| D-2260 | +GalNAcThgcucuaAfgAfUfCfUfgaugaagus{invAb} | 3193 | usAfscuucAfucagauCfuUfagagcsusu | 3486 |
| D-2261 | [GalNAc3]scguccuGfgAfAfUfAfuuagaugcs{invAb} | 3194 | asGfscaucUfaauauuCfcAfggacgsusu | 3487 |
| D-2262 | [GalNAc3]scaacucUfaAfGfAfUfcugaugaas{invAb} | 3195 | asUfsucauCfagaucuUfaGfaguugsusu | 3488 |
| D-2263 | [GalNAc3]sggaagaAfaAfGfUfGfauucagugs{invAb} | 3196 | usCfsacugAfaucacuUfuUfcuuccsusu | 3489 |
| D-2264 | [GalNAc3]s[invAb]guccugGfaAfUfAfUfuagaugcscs{invAb} | 3197 | asGfsgcauCfuaauauUfcCfaggacsusu | 3338 |
| D-2265 | [GalNAc3]s[invAb]uccuggAfaUfAfUfUfagaugccsus{invAb} | 3198 | asAfsggcaUfcuaauaUfuCfcaggasusu | 3336 |
| D-2266 | [GalNAc3]s[invAb]acucuaAfgAfUfCfUfgaugaagsus{invAb} | 3199 | usAfscuucAfucagauCfuUfagagususu | 3337 |
| D-2267 | [GalNAc3]s[invAb]agacagCfaUfUfGfGfauuuccusas{invAb} | 3200 | usUfsaggaAfauccaaUfgCfugucususu | 2802 |
| D-2268 | [GalNAc3]sguccagGfaAfUfAfUfuagaugccs{invAb} | 3201 | asGfsgcauCfuaauauUfcCfuggacsusu | 3490 |
| D-2269 | [GalNAc3]sgugcugGfaAfUfAfUfuagaugccs{invAb} | 3202 | asGfsgcauCfuaauauUfcCfagcacsusu | 3491 |
| D-2270 | [GalNAc3]succucgAfaUfAfUfUfagaugccus{invAb} | 3203 | asAfsggcaUfcuaauaUfuCfgaggasusu | 3492 |
| D-2271 | [GalNAc3]sucguggAfaUfAfUfUfagaugccus{invAb} | 3204 | asAfsggcaUfcuaauaUfuCfcacgasusu | 3493 |
| D-2272 | [GalNAc3]sacacuaAfgAfUfCfUfgaugaagus{invAb} | 3205 | usAfscuucAfucagauCfuUfagugususu | 3494 |
| D-2273 | [GalNAc3]sagucuaAfgAfUfCfUfgaugaagus{invAb} | 3206 | usAfscuucAfucagauCfuUfagacususu | 3495 |
| D-2274 | [GalNAc3]sagucagCfaUfUfGfGfauuuccuas{invAb} | 3207 | usUfsaggaAfauccaaUfgCfugacususu | 3496 |
| D-2275 | [GalNAc3]sacacagCfaUfUfGfGfauuuccuas{invAb} | 3208 | usUfsaggaAfauccaaUfgCfugugususu | 3497 |
| D-2276 | [GalNAc3]s{invAb}guccuggaAfuAfUfUfAfgaugcscs{invAb} | 3209 | asGfsgcauCfuaauauUfcCfaggacsusu | 3338 |
| D-2277 | [GalNAc3]s{invAb}guccugGfaAfuAfuuagaugcscs{invAb} | 3210 | asGfsgcauCfuaauauUfcCfaggacsusu | 3338 |
| D-2278 | [GalNAc3]s{invAb}guccugGfaAfUfAfUfuagaugcscs{invAb} | 3211 | asGfsgcauCfuaauAfuUfccaggacsusu | 3477 |
| D-2279 | [GalNAc3]s{invAb}guccuggaAfuAfUfUfAfgaugcscs{invAb} | 3209 | asGfsgcauCfuaauAfuUfccaggacsusu | 3477 |
| D-2280 | [GalNAc3]s{invAb}guccugGfaAfuAfuuagaugcscs{invAb} | 3210 | asGfsgcauCfuaauAfuUfccaggacsusu | 3477 |
| D-2281 | [GalNAc3]s{invAb}guccugGfaAfUfAfUfuagaugcscs{invAb} | 3211 | asGfsgcaucuaauauUfcCfaggacsusu | 3498 |
| D-2282 | [GalNAc3]s{invAb}guccuggaAfuAfUfUfAfgaugcscs{invAb} | 3209 | asGfsgcaucuaauauUfcCfaggacsusu | 3498 |
| D-2283 | [GalNAc3]s{invAb}guccugGfaAfuAfuuagaugcscs{invAb} | 3210 | asGfsgcaucuaauauUfcCfaggacsusu | 3498 |
| D-2284 | [GalNAc3]s{invAb}guccugGfaAfUfAfUfuagaugcscs{invAb} | 3211 | asGfsgcaUfCfuaauauUfcCfaggacsusu | 3499 |
| D-2285 | [GalNAc3]s{invAb}guccuggaAfuAfUfUfAfgaugcscs{invAb} | 3209 | asGfsgcaUfCfuaauauUfcCfaggacsusu | 3499 |
| D-2286 | [GalNAc3]s{invAb}guccugGfaAfuAfuuagaugcscs{invAb} | 3210 | asGfsgcaUfCfuaauauUfcCfaggacsusu | 3499 |
| D-2287 | [GalNAc3]s{invAb}guccugGfaAfUfAfUfuagaugcscs{invAb} | 3211 | asGfsgcauCfuaauAfuUfcCfaggacsusu | 3500 |
| D-2288 | [GalNAc3]s{invAb}guccuggaAfuAfUfUfAfgaugcscs{invAb} | 3209 | asGfsgcauCfuaauAfuUfcCfaggacsusu | 3500 |
| D-2289 | [GalNAc3]s{invAb}guccugGfaAfuAfuuagaugcscs{invAb} | 3210 | asGfsgcauCfuaauAfuUfcCfaggacsusu | 3500 |
| D-2291 | [GalNAc3]scaaugcUfuCfaAfugucccagus{invAb} | 3161 | asAfscuggGfacauugAfaGfcauugsusu | 2783 |
| D-2292 | [GalNAc3]scaaugcUfuCfAfAfUfgucccagus{invAb} | 2051 | asAfscuggGfacauUfgAfagcauugsusu | 3414 |
| D-2293 | [GalNAc3]scaaugcUfuCfaAfugucccagus{invAb} | 3161 | asAfscuggGfacauUfgAfagcauugsusu | 3414 |
| D-2294 | [GalNAc3]scaaugcUfuCfAfAfUfgucccagus{invAb} | 2051 | asAfscugggacauUfgAfaGfcauugsusu | 3428 |
| D-2295 | [GalNAc3]scaaugcuuCfaAfUfGfUfcccagus{invAb} | 3155 | asAfscugggacauUfgAfaGfcauugsusu | 3428 |
| D-2296 | [GalNAc3]scaaugcuuCfaAfUfGfUfcccagus{invAb} | 3155 | asAfscugGfGfacauugAfaGfcauugsusu | 3430 |
| D-2297 | [GalNAc3]scaaugcUfuCfaAfugucccagus{invAb} | 3161 | asAfscugGfGfacauugAfaGfcauugsusu | 3430 |
| D-2298 | [GalNAc3]scaaugcuuCfaAfUfGfUfcccagus{invAb} | 3155 | asAfscuggGfacauUfgAfaGfcauugsusu | 3431 |
| D-2299 | [GalNAc3]scaaugcUfuCfaAfugucccagus{invAb} | 3161 | asAfscuggGfacauUfgAfaGfcauugsusu | 3431 |
| D-2301 | [GalNAc3]sauguccUfgGfAfAfUfauuagaugs{invAb} | 3212 | asCfsaucuAfauauucCfaGfgacaususu | 3501 |
| D-2302 | [GalNAc3]suauaacUfcUfAfAfGfaucugaugs{invAb} | 3213 | usCfsaucaGfaucuuaGfaGfuuauasusu | 3502 |
| D-2303 | [GalNAc3]suaagauCfuGfAfUfGfaaguauaus{invAb} | 3214 | asAfsuauaCfuucaucAfgAfucuuasusu | 3503 |
| D-2304 | [GalNAc3]sggugucUfcAfAfUfGfcuucaaugs{invAb} | 3215 | asCfsauugAfagcauuGfaGfacaccsusu | 3504 |
| D-2305 | [GalNAc3]sgugucuCfaAfUfGfCfuucaaugus{invAb} | 3216 | asAfscauuGfaagcauUfgAfgacacsusu | 3505 |
| D-2306 | [GalNAc3]sucucaaUfgCfUfUfCfaaugucccs{invAb} | 3217 | usGfsggacAfuugaagCfaUfugagasusu | 3506 |
| D-2307 | [GalNAc3]saaugcuUfcAfAfUfGfucccagugs{invAb} | 3218 | asCfsacugGfgacauuGfaAfgcauususu | 3507 |
| D-2308 | [GalNAc3]saugcuuCfaAfUfGfUfcccagugcs{invAb} | 3219 | usGfscacuGfggacauUfgAfagcaususu | 3508 |
| D-2309 | [GalNAc3]succuggAfaUfaUfuagaugccus{invAb} | 3220 | asAfsggcaUfcuaauaUfuCfcaggasusu | 3336 |
| D-2310 | [GalNAc3]sacucuaAfgAfuCfugaugaagus{invAb} | 3221 | usAfscuucAfucagauCfuUfagagususu | 3337 |
| D-2311 | [GalNAc3]sguccugGfaAfuAfuuagaugccs{invAb} | 3222 | asGfsgcauCfuaauauUfcCfaggacsusu | 3338 |
| D-2312 | [GalNAc3]suguccuGfgAfaUfauuagaugcs{invAb} | 3223 | asGfscaucUfaauauuCfcAfggacasusu | 3339 |
| D-2313 | [GalNAc3]suaacucUfaAfgAfucugaugaas{invAb} | 3224 | asUfsucauCfagaucuUfaGfaguuasusu | 3340 |
| D-2314 | [GalNAc3]succuggaaUfaUfUfAfGfaugccus{invAb} | 3191 | asAfsggcaUfcuaauaUfuCfcaggasusu | 3336 |
| D-2315 | [GalNAc3]sacucuaagAfuCfUfGfAfugaagus{invAb} | 3190 | usAfscuucAfucagauCfuUfagagususu | 3337 |
| D-2316 | [GalNAc3]sguccuggaAfuAfUfUfAfgaugccs{invAb} | 3189 | asGfsgcauCfuaauauUfcCfaggacsusu | 3338 |
| D-2317 | [GalNAc3]suguccuggAfaUfAfUfUfagaugcs{invAb} | 3188 | asGfscaucUfaauauuCfcAfggacasusu | 3339 |
| D-2318 | [GalNAc3]suaacucuaAfgAfUfCfUfgaugaas{invAb} | 3225 | asUfsucauCfagaucuUfaGfaguuasusu | 3340 |
| D-2319 | [GalNAc3]succuggAfaUfaUfuagaugccus{invAb} | 3220 | asAfsggcaUfcuaaUfaUfuccaggasusu | 3479 |
| D-2320 | [GalNAc3]sacucuaAfgAfuCfugaugaagus{invAb} | 3221 | usAfscuucAfucagAfuCfuuagagususu | 3478 |
| D-2321 | [GalNAc3]sguccugGfaAfuAfuuagaugccs{invAb} | 3222 | asGfsgcauCfuaauAfuUfccaggacsusu | 3477 |
| D-2322 | [GalNAc3]suguccuGfgAfaUfauuagaugcs{invAb} | 3223 | asGfscaucUfaauaUfuCfcaggacasusu | 3476 |
| D-2323 | [GalNAc3]suaacucUfaAfgAfucugaugaas{invAb} | 3224 | asUfsucauCfagauCfuUfagaguuasusu | 3509 |
| D-2324 | [GalNAc3]succuggAfaUfAfUfUfagaugccus{invAb} | 3077 | asAfsggcaucuaaUfaUfuCfcaggasusu | 3510 |
| D-2325 | [GalNAc3]sacucuaAfgAfUfCfUfgaugaagus{invAb} | 3078 | usAfscuucaucagAfuCfuUfagagususu | 3511 |
| D-2326 | [GalNAc3]sguccugGfaAfUfAfUfuagaugccs{invAb} | 3079 | asGfsgcaucuaauAfuUfcCfaggacsusu | 3512 |
| D-2327 | [GalNAc3]suguccuGfgAfAfUfAfuuagaugcs{invAb} | 3080 | asGfscaucuaauaUfuCfcAfggacasusu | 3513 |
| D-2328 | [GalNAc3]suaacucUfaAfGfAfUfcugaugaas{invAb} | 3081 | asUfsucaucagauCfuUfaGfaguuasusu | 3514 |
| D-2329 | [GalNAc3]succuggAfaUfAfUfUfagaugccus{invAb} | 3077 | asAfsggcaUfcuaaUfaUfuccaggasusu | 3479 |
| D-2330 | [GalNAc3]sacucuaAfgAfUfCfUfgaugaagus{invAb} | 3078 | usAfscuucAfucagAfuCfuuagagususu | 3478 |
| D-2331 | [GalNAc3]sguccugGfaAfUfAfUfuagaugccs{invAb} | 3079 | asGfsgcauCfuaauAfuUfccaggacsusu | 3477 |
| D-2332 | [GalNAc3]suguccuGfgAfAfUfAfuuagaugcs{invAb} | 3080 | asGfscaucUfaauaUfuCfcaggacasusu | 3476 |
| D-2333 | [GalNAc3]suaacucUfaAfGfAfUfcugaugaas{invAb} | 3081 | asUfsucauCfagauCfuUfagaguuasusu | 3509 |
| D-2334 | [GalNAc3]succuggaaUfaUfUfAfGfaugccus{invAb} | 3191 | asAfsggcaucuaaUfaUfuCfcaggasusu | 3510 |
| D-2335 | [GalNAc3]sacucuaagAfuCfUfGfAfugaagus{invAb} | 3190 | usAfscuucaucagAfuCfuUfagagususu | 3511 |
| D-2336 | [GalNAc3]sguccuggaAfuAfUfUfAfgaugccs{invAb} | 3189 | asGfsgcaucuaauAfuUfcCfaggacsusu | 3512 |
| D-2337 | [GalNAc3]suguccuggAfaUfAfUfUfagaugcs{invAb} | 3188 | asGfscaucuaauaUfuCfcAfggacasusu | 3513 |
| D-2338 | [GalNAc3]suaacucuaAfgAfUfCfUfgaugaas{invAb} | 3225 | asUfsucaucagauCfuUfaGfaguuasusu | 3514 |
| D-2339 | [GalNAc3]succuggaaUfaUfUfAfGfaugccus{invAb} | 3191 | asAfsggcaUfcuaaUfaUfuCfcaggasusu | 3515 |
| D-2340 | [GalNAc3]sacucuaagAfuCfUfGfAfugaagus{invAb} | 3190 | usAfscuucAfucagAfuCfuUfagagususu | 3516 |
| D-2341 | [GalNAc3]sguccuggaAfuAfUfUfAfgaugccs{invAb} | 3189 | asGfsgcauCfuaauAfuUfcCfaggacsusu | 3500 |
| D-2342 | [GalNAc3]suguccuggAfaUfAfUfUfagaugcs{invAb} | 3188 | asGfscaucUfaauaUfuCfcAfggacasusu | 3517 |
| D-2343 | [GalNAc3]suaacucuaAfgAfUfCfUfgaugaas{invAb} | 3225 | asUfsucauCfagauCfuUfaGfaguuasusu | 3518 |
| D-2344 | [GalNAc3]succuggAfaUfaUfuagaugccus{invAb} | 3220 | asAfsggcAfUfcuaauaUfuCfcaggasusu | 3519 |
| D-2345 | [GalNAc3]sacucuaAfgAfuCfugaugaagus{invAb} | 3221 | usAfscuuCfAfucagauCfuUfagagususu | 3520 |
| D-2346 | [GalNAc3]sguccugGfaAfuAfuuagaugccs{invAb} | 3222 | asGfsgcaUfCfuaauauUfcCfaggacsusu | 3499 |
| D-2347 | [GalNAc3]suguccuGfgAfaUfauuagaugcs{invAb} | 3223 | asGfscauCfUfaauauuCfcAfggacasusu | 3521 |
| D-2348 | [GalNAc3]suaacucUfaAfgAfucugaugaas{invAb} | 3224 | asUfsucaUfCfagaucuUfaGfaguuasusu | 3522 |
| D-2349 | [GalNAc3]succuggaaUfaUfUfAfGfaugccus{invAb} | 3191 | asAfsggcAfUfcuaauaUfuCfcaggasusu | 3519 |
| D-2350 | [GalNAc3]sacucuaagAfuCfUfGfAfugaagus{invAb} | 3190 | usAfscuuCfAfucagauCfuUfagagususu | 3520 |
| D-2351 | [GalNAc3]sguccuggaAfuAfUfUfAfgaugccs{invAb} | 3189 | asGfsgcaUfCfuaauauUfcCfaggacsusu | 3499 |
| D-2352 | [GalNAc3]suguccuggAfaUfAfUfUfagaugcs{invAb} | 3188 | asGfscauCfUfaauauuCfcAfggacasusu | 3521 |
| D-2353 | [GalNAc3]suaacucuaAfgAfUfCfUfgaugaas{invAb} | 3225 | asUfsucaUfCfagaucuUfaGfaguuasusu | 3522 |
| D-2354 | [GalNAc3]succuggAfaUfaUfuagaugccus{invAb} | 3220 | asAfsggcaUfcuaaUfaUfuCfcaggasusu | 3515 |
| D-2355 | [GalNAc3]sacucuaAfgAfuCfugaugaagus{invAb} | 3221 | usAfscuucAfucagAfuCfuUfagagususu | 3516 |
| D-2356 | [GalNAc3]sguccugGfaAfuAfuuagaugccs{invAb} | 3222 | asGfsgcauCfuaauAfuUfcCfaggacsusu | 3500 |
| D-2357 | [GalNAc3]suguccuGfgAfaUfauuagaugcs{invAb} | 3223 | asGfscaucUfaauaUfuCfcAfggacasusu | 3517 |
| D-2358 | [GalNAc3]suaacucUfaAfgAfucugaugaas{invAb} | 3224 | asUfsucauCfagauCfuUfaGfaguuasusu | 3518 |
| D-2359 | [GalNAc3]sugauggCfuUfGfUfUfccagaugcs{invAb} | 3226 | usGfscaucUfggaacaAfgCfcaucasusu | 3523 |
| D-2360 | [GalNAc3]sgauggcUfuGfUfUfCfcagaugcas{invAb} | 3227 | asUfsgcauCfuggaacAfaGfccaucsusu | 3524 |
| D-2361 | [GalNAc3]scucagaCfaGfCfAfUfuggauuucs{invAb} | 3228 | asGfsaaauCfcaaugcUfgUfcugagsusu | 3525 |
| D-2362 | [GalNAc3]sugccauUfuUfGfUfCfcuuugauus{invAb} | 3229 | usAfsaucaAfaggacaAfaAfuggcasusu | 3526 |
| D-2363 | [GalNAc3]sccauuuUfgUfCfCfUfuugauuaus{invAb} | 3230 | usAfsuaauCfaaaggaCfaAfaauggsusu | 3527 |
| D-2364 | [GalNAc3]sugauggcuUfgUfUfCfCfagaugcs{invAb} | 3231 | usGfscaucUfggaaCfaAfgccaucasusu | 3528 |
| D-2365 | [GalNAc3]sgauggcuuGfuUfCfCfAfgaugcas{invAb} | 3232 | asUfsgcauCfuggaAfcAfagccaucsusu | 3529 |
| D-2366 | [GalNAc3]scucagacaGfcAfUfUfGfgauuucs{invAb} | 3233 | asGfsaaauCfcaauGfcUfgucugagsusu | 3530 |
| D-2367 | [GalNAc3]sugccauuuUfgUfCfCfUfuugauus{invAb} | 3234 | usAfsaucaAfaggaCfaAfaauggcasusu | 3531 |
| D-2368 | [GalNAc3]sccauuuugUfcCfUfUfUfgauuaus{invAb} | 3235 | usAfsuaauCfaaagGfaCfaaaauggsusu | 3532 |
| D-2369 | [GalNAc3]sugauggCfuUfGfUfUfccagaugcs{invAb} | 3226 | usGfscAfuCfuggaacaAfgCfcaucasusu | 3533 |
| D-2370 | [GalNAc3]sgauggcUfuGfUfUfCfcagaugcas{invAb} | 3227 | asUfsgCfaUfcuggaacAfaGfccaucsusu | 3534 |
| D-2371 | [GalNAc3]scucagaCfaGfCfAfUfuggauuucs{invAb} | 3228 | asGfsaAfaUfccaaugcUfgUfcugagsusu | 3535 |
| D-2372 | [GalNAc3]sugccauUfuUfGfUfCfcuuugauus{invAb} | 3229 | usAfsaUfcAfaaggacaAfaAfuggcasusu | 3536 |
| D-2373 | [GalNAc3]sccauuuUfgUfCfCfUfuugauuaus{invAb} | 3230 | usAfsuAfaUfcaaaggaCfaAfaauggsusu | 3537 |
| D-2374 | [GalNAc3]sgsauuuuCfaCfAfUfUfuuucgucus{invAb} | 3236 | asAfsgacgAfaaaaugUfgAfaaaucsusu | 3369 |
| D-2375 | [GalNAc3]sgauuuucaCfaUfUfUfUfucgucus{invAb} | 3237 | asAfsgacgAfaaaaUfgUfgaaaaucsusu | 3538 |
| D-2376 | [GalNAc3]sgaauauuaGfaUfGfCfCfuuuuaas{invAb} | 3238 | usUfsuaaaAfggcaUfcUfaauauucsusu | 3539 |
| D-2377 | [GalNAc3]saggaaagcAfuAfUfGfUfcaguugs{invAb} | 3239 | asCfsaacuGfacauAfuGfcuuuccususu | 3540 |
| D-2378 | [GalNAc3]sgccauuuuGfuCfCfUfUfugauuas{invAb} | 3240 | asUfsaaucAfaaggAfcAfaaauggcsusu | 3541 |
| D-2379 | [GalNAc3]sgauuuuCfaCfAfUfUfuuucgucus{invAb} | 3110 | asAfsgAfcGfaaaaaugUfgAfaaaucsusu | 2605 |
| D-2380 | [GalNAc3]sgaauauUfaGfAfUfGfccuuuuaas{invAb} | 3112 | usUfsuAfaAfaggcaucUfaAfuauucsusu | 2597 |
| D-2381 | [GalNAc3]saggaaaGfcAfUfAfUfgucaguugs{invAb} | 3114 | asCfsaAfcUfgacauauGfcUfuuccususu | 2727 |
| D-2382 | [GalNAc3]sgccauuUfuGfUfCfCfuuugauuas{invAb} | 3117 | asUfsaAfuCfaaaggacAfaAfauggcsusu | 2739 |
| D-2383 | [GalNAc3]sgsasuuuuCfaCfAfUfUfuuucgucus{invAb} | 3241 | asAfsgacgAfaaaaugUfgAfaaaucsusu | 3369 |
| D-2384 | [GalNAc3]scaaugcuuCfaAfUfGfUfcccagus{invAb} | 3155 | asAfscuggGfacauugAfaGfcaususg | 3434 |
| D-2385 | [GalNAc3]scaaugcUfuCfAfAfUfgucccagus{invAb} | 2051 | asAfscugGfGfacauugAfaGfcaususg | 3542 |
| D-2386 | [GalNAc3]saugcuuCfaAfUfGfUfcccaguuus{invAb} | 3151 | asAfscuggGfacauugAfaGfcaususg | 3434 |
| D-2387 | [GalNAc3]saugcuuCfaAfUfGfUfcccaguuus{invAb} | 3151 | asAfscugGfGfacauugAfaGfcaususu | 3543 |
| D-2388 | [GalNAc3]scaaugcuuCfaAfUfGfUfcccagus{invAb} | 3155 | asAfscuggGfacauugAfaGfcauugsusu | 2783 |
| D-2389 | [GalNAc3]scaaugcuuCfaAfUfGfUfcccagus{invAb} | 3155 | asAfscuggGfacauugAfaGfcauugsasg | 3427 |
| D-2390 | [GalNAc3]saugcUfuCfAfAfUfgucccaguuus{invAb} | 3242 | asAfscuggGfacauugAfaGfcaususu | 3410 |
| D-2391 | [GalNAc3]scaaugcUfuCfAfAfUfgucccagus{invAb} | 2051 | asAfscugGfGfacauugAfaGfcauugsasg | 3544 |
| D-2392 | [GalNAc3]saugcUfuCfAfAfUfgucccaguuus{invAb} | 3242 | asAfscuggGfacauugAfaGfcaususg | 3434 |
| D-2393 | [GalNAc3]succuggAfaUfaUfuagaugccus{invAb} | 3220 | asAfsggcaucuaaUfaUfuCfcaggasusu | 3510 |
| D-2394 | [GalNAc3]sacucuaAfgAfuCfugaugaagus{invAb} | 3221 | usAfscuucaucagAfuCfuUfagagususu | 3511 |
| D-2395 | [GalNAc3]sguccugGfaAfuAfuuagaugccs{invAb} | 3222 | asGfsgcaucuaauAfuUfcCfaggacsusu | 3512 |
| D-2396 | [GalNAc3]suguccuGfgAfaUfauuagaugcs{invAb} | 3223 | asGfscaucuaauaUfuCfcAfggacasusu | 3513 |
| D-2397 | [GalNAc3]suaacucUfaAfgAfucugaugaas{invAb} | 3224 | asUfsucaucagauCfuUfaGfaguuasusu | 3514 |
| D-2399 | [GalNAc3]scaaugcUfuCfAfAfUfgucccagus{invAb} | 2051 | asAfscuggGfacauUfgAfaGfcaususg | 3545 |
| D-2400 | [GalNAc3]saugcuuCfaAfUfGfUfcccaguuus{invAb} | 3151 | asAfscuggGfacauUfgAfaGfcaususu | 3546 |
| D-2401 | [GalNAc3]scaaugcUfuCfAfAfUfgucccagus{invAb} | 2051 | asAfscuggGfacauUfgAfaGfcauugsasg | 3547 |
| D-2402 | [GalNAc3]scaaugcuuCfaAfUfGfUfcccagus{invAb} | 3155 | asAfscugGfGfacauugAfaGfcauugsasg | 3544 |
| D-2403 | [GalNAc3]scaaugcuuCfaAfUfGfUfcccagus{invAb} | 3155 | asAfscuggGfacauUfgAfaGfcauugsasg | 3547 |
| D-2430 | [GalNAc3]sgauuuuCfaCfAfUfUfuuucgucus{invAb} | 3110 | asAfsgacgAfaaaaugUfgAfaaasusc | 3548 |
| D-2431 | [GalNAc3]sgaauauUfaGfAfUfGfccuuuuaas{invAb} | 3112 | usUfsuaaaAfggcaucUfaAfuaususc | 3549 |
| D-2432 | [GalNAc3]saggaaaGfcAfUfAfUfgucaguugs{invAb} | 3114 | asCfsaacuGfacauauGfcUfuucscsu | 3550 |
| D-2433 | [GalNAc3]sgccauuUfuGfUfCfCfuuugauuas{invAb} | 3117 | asUfsaaucAfaaggacAfaAfaugsgsc | 3551 |
| D-2434 | [GalNAc3]saaauauAfgUfCfUfCfaauaacuus{invAb} | 3129 | usAfsaguuAfuugagaCfuAfuaususu | 3552 |
| D-2435 | [GalNAc3]suaccaaGfaGfCfGfCfagacuugcs{invAb} | 3071 | usGfscaagUfcugcgcUfcUfuggsusa | 3553 |
| D-2436 | [GalNAc3]sgaugccUfuUfUfAfAfaaauguucs{invAb} | 3107 | asGfsaacaUfuuuuaaAfaGfgcasusc | 3554 |
| D-2437 | [GalNAc3]sauguccUfgGfAfAfUfauuagaugs{invAb} | 3212 | asCfsaucuAfauauucCfaGfgacsasu | 3555 |
| D-2438 | [GalNAc3]saaauauagUfcUfCfAfAfuaacuus{invAb} | 3243 | usAfsaguuAfuugaGfaCfuauauuususu | 3556 |
| D-2439 | [GalNAc3]suaccaagaGfcGfCfAfGfacuugcs{invAb} | 3244 | usGfscaagUfcugcGfcUfcuugguasusu | 3557 |
| D-2440 | [GalNAc3]sgaugccuuUfuAfAfAfAfauguucs{invAb} | 3245 | asGfsaacaUfuuuuAfaAfaggcaucsusu | 3558 |
| D-2441 | [GalNAc3]sauguccugGfaAfUfAfUfuagaugs{invAb} | 3246 | asCfsaucuAfauauUfcCfaggacaususu | 3559 |
| D-2442 | [GalNAc3]saaauauAfgUfCfUfCfaauaacuus{invAb} | 3129 | usAfsaGfuUfauugagaCfuAfuauuususu | 2627 |
| D-2443 | [GalNAc3]suaccaaGfaGfCfGfCfagacuugcs{invAb} | 3071 | usGfscAfaGfucugcgcUfcUfugguasusu | 2667 |
| D-2444 | [GalNAc3]sgaugccUfuUfUfAfAfaaauguucs{invAb} | 3107 | asGfsaAfcAfuuuuuaaAfaGfgcaucsusu | 2598 |
| D-2445 | [GalNAc3]sauguccUfgGfAfAfUfauuagaugs{invAb} | 3212 | asCfsaUfcUfaauauucCfaGfgacaususu | 2457 |
| D-2446 | [GalNAc3]suuuucaCfaUfUfUfUfucgucuuus{invAb} | 3247 | asAfsgacgAfaaaaugUfgAfaaasusu | 3560 |
| D-2447 | [GalNAc3]sauauuaGfaUfGfCfCfuuuuaaaus{invAb} | 3248 | usUfsuaaaAfggcaucUfaAfuaususu | 3561 |
| D-2448 | [GalNAc3]sgaaagcAfuAfUfGfUfcaguuguus{invAb} | 3249 | asCfsaacuGfacauauGfcUfuucsusu | 3562 |
| D-2449 | [GalNAc3]scauuuuGfuCfCfUfUfugauuauus{invAb} | 3250 | asUfsaaucAfaaggacAfaAfaugsusu | 3563 |
| D-2450 | [GalNAc3]sauauagUfcUfCfAfAfuaacuuaus{invAb} | 3251 | usAfsaguuAfuugagaCfuAfuaususu | 3552 |
| D-2451 | [GalNAc3]sccaagaGfcGfCfAfGfacuugcaus{invAb} | 3252 | usGfscaagUfcugcgcUfcUfuggsusu | 3564 |
| D-2452 | [GalNAc3]sugccuuUfuAfAfAfAfauguucuus{invAb} | 3253 | asGfsaacaUfuuuuaaAfaGfgcasusu | 3565 |
| D-2453 | [GalNAc3]sguccugGfaAfUfAfUfuagauguus{invAb} | 3254 | asCfsaucuAfauauucCfaGfgacsusu | 3566 |
| D-2454 | [GalNAc3]sgcucuaAfgAfUfCfUfgaugaagus{invAb} | 3193 | usAfscUfuCfaucagauCfuUfagagcsusu | 3567 |
| D-2455 | [GalNAc3]sgcucuaagAfuCfUfGfAfugaagus{invAb} | 3255 | usAfscuucAfucagAfuCfuuagagcsusu | 3568 |
| D-2456 | [GalNAc3]sgcucuaagAfuCfUfGfAfugaagus{invAb} | 3255 | usAfscUfuCfaucagAfuCfuuagagcsusu | 3569 |
| D-2457 | [GalNAc3]sccuaagAfuCfUfGfAfugaaguaus{invAb} | 3256 | usAfscuucAfucagauCfuUfaggsusu | 3570 |
| D-2458 | [GalNAc3]sccuaagAfuCfUfGfAfugaaguaus{invAb} | 3256 | usAfscUfuCfaucagauCfuUfaggsusu | 3571 |
| D-2459 | [GalNAc3]sccuaAfgAfUfCfUfgaugaaguaus{invAb} | 3257 | usAfscuucAfucagauCfuUfaggsusu | 3570 |
| D-2460 | [GalNAc3]sccuaAfgAfUfCfUfgaugaaguaus{invAb} | 3257 | usAfscUfuCfaucagauCfuUfaggsusu | 3571 |
| D-2461 | [GalNAc3]suuguuuAfaAfAfCfCfcaauaucus{invAb} | 2026 | usAfsgauaUfuggguuUfuAfaacaascsu | 3572 |
| D-2462 | [GalNAc3]scagaacGfaAfAfGfUfuauauggas{invAb} | 2010 | usUfsccauAfuaacuuUfcGfuucugsasa | 3573 |
| D-2463 | [GalNAc3]scuaagaUfcUfGfAfUfgaaguauas{invAb} | 2054 | asUfsauacUfucaucaGfaUfcuuagsasg | 3574 |
| D-2464 | [GalNAc3]suggaaaAfuCfAfCfCfacucuuugs{invAb} | 2069 | asCfsaaagAfguggugAfuUfuuccasusa | 3575 |
| D-2465 | [GalNAc3]suaacucUfaAfGfAfUfcugaugaas{invAb} | 3081 | asUfsucauCfagaucuUfaGfagususa | 3576 |
| D-2466 | [GalNAc3]sagaagaAfaAfGfUfGfauucagugs{invAb} | 3069 | usCfsacugAfaucacuUfuUfcuuscsu | 3577 |
| D-2467 | [GalNAc3]sgauuuuCfaCfAfUfUfuuucgucus{invAb} | 3110 | asAfsgacgAfaaaaugUfgAfaaaucsasc | 3578 |
| D-2468 | [GalNAc3]suaacucUfaAfGfAfUfcugaugaas{invAb} | 3081 | asUfsucauCfagaucuUfaGfaguuasusa | 3579 |
| D-2469 | [GalNAc3]sagaagaAfaAfGfUfGfauucagugs{invAb} | 3069 | usCfsacugAfaucacuUfuUfcuucuscsc | 3580 |
| D-2470 | [GalNAc3]suaacucuaAfgAfUfCfUfgaugaas{invAb} | 3225 | asUfsucauCfagauCfuUfagaguuasusu | 3509 |
| D-2471 | [GalNAc3]sagaagaaaAfgUfGfAfUfucagugs{invAb} | 3258 | usCfsacugAfaucaCfuUfuucuucususu | 3581 |
| D-2472 | [GalNAc3]saagaucUfgAfUfGfAfaguauauus{invAb} | 2065 | asUfsauacUfucaucaGfaUfcuusasg | 3438 |
| D-2473 | [GalNAc3]sacucuaAfgAfUfCfUfgaugaauus{invAb} | 3259 | asUfsucauCfagaucuUfaGfagususu | 3582 |
| D-2474 | [GalNAc3]saagaaaAfgUfGfAfUfucagugaus{invAb} | 3260 | usCfsacugAfaucacuUfuUfcuususu | 3583 |
| D-2475 | [GalNAc3]sgaaaauCfaCfCfAfCfucuuuguus{invAb} | 3166 | asCfsaaagAfguggugAfuUfuucscsa | 3460 |
| D-2476 | [GalNAc3]suuuucaCfaUfUfUfUfucgucuuus{invAb} | 3247 | asAfsgacgAfaaaaugUfgAfaaasusc | 3548 |
| D-2477 | [GalNAc3]sacucuaAfgAfUfCfUfgaugaauus{invAb} | 3259 | asUfsucauCfagaucuUfaGfagususa | 3576 |
| D-2478 | [GalNAc3]saagaaaAfgUfGfAfUfucagugaus{invAb} | 3260 | usCfsacugAfaucacuUfuUfcuuscsu | 3577 |
| D-2479 | [GalNAc3]sgaacgaAfaGfUfUfAfuauggaaus{invAb} | 3152 | usUfsccauAfuaacuuUfcGfuucsusg | 3435 |
| D-2480 | [GalNAc3]suaccaaGfaGfCfGfCfagacuugcs{invAb} | 3071 | usGfscaagUfcugcgcUfcUfugguasgsa | 3584 |
| D-2481 | [GalNAc3]sccaagaGfcGfCfAfGfacuugcaus{invAb} | 3252 | usGfscaagUfcugcgcUfcUfuggsusa | 3553 |
| D-2482 | [GalNAc3]sccuggaAfuAfUfUfAfgaugccusus{invAb} | 3261 | asGfsgcauCfuaauauUfcCfaggsusu | 3472 |
| D-2483 | [GalNAc3]saauagcAfgAfCfUfUfguuccgacs{invAb} | 2066 | asGfsucggAfacaaguCfuGfcuasusu | 3585 |
| D-2484 | [GalNAc3]sccccguUfuAfAfCfUfgauuauggs{invAb} | 3115 | usCfscauaAfucaguuAfaAfcggsgsg | 3586 |
| D-2485 | [GalNAc3]saugacaAfcAfCfUfUfgaagcaugs{invAb} | 3118 | asCfsaugcUfucaaguGfuUfgucsasu | 3587 |
| D-2486 | [GalNAc3]suauugcCfaUfUfUfUfguccuuugs{invAb} | 3138 | usCfsaaagGfacaaaaUfgGfcaasusa | 3588 |
| D-2487 | [GalNAc3]suauaacUfcUfAfAfGfaucugaugs{invAb} | 3213 | usCfsaucaGfaucuuaGfaGfuuasusa | 3589 |
| D-2488 | [GalNAc3]sgugucuCfaAfUfGfCfuucaaugus{invAb} | 3216 | asAfscauuGfaagcauUfgAfgacsasc | 3590 |
| D-2489 | [GalNAc3]saauagcAfgAfCfUfUfguuccgacs{invAb} | 2066 | asGfsuCfgGfaacaaguCfuGfcuauususu | 2171 |
| D-2490 | [GalNAc3]sccccguUfuAfAfCfUfgauuauggs{invAb} | 3115 | usCfscAfuAfaucaguuAfaAfcggggsusu | 2653 |
| D-2491 | [GalNAc3]saugacaAfcAfCfUfUfgaagcaugs{invAb} | 3118 | asCfsaUfgCfuucaaguGfuUfgucaususu | 2371 |
| D-2492 | [GalNAc3]suauugcCfaUfUfUfUfguccuuugs{invAb} | 3138 | usCfsaAfaGfgacaaaaUfgGfcaauasusu | 2338 |
| D-2493 | [GalNAc3]suauaacUfcUfAfAfGfaucugaugs{invAb} | 3213 | usCfsaUfcAfgaucuuaGfaGfuuauasusu | 2475 |
| D-2494 | [GalNAc3]sgugucuCfaAfUfGfCfuucaaugus{invAb} | 3216 | asAfscAfuUfgaagcauUfgAfgacacsusu | 2245 |
| D-2495 | [GalNAc3]suagcagAfcUfUfGfUfuccgacusus{invAb} | 3262 | asGfsucggAfacaaguCfuGfcuasusu | 3585 |
| D-2496 | [GalNAc3]sccguuuAfaCfUfGfAfuuauggasus{invAb} | 3263 | usCfscauaAfucaguuAfaAfcggsusu | 3591 |
| D-2497 | [GalNAc3]sgacaacAfcUfUfGfAfagcaugusus{invAb} | 3264 | asCfsaugcUfucaaguGfuUfgucsusu | 3592 |
| D-2498 | [GalNAc3]suugccaUfuUfUfGfUfccuuugasus{invAb} | 3265 | usCfsaaagGfacaaaaUfgGfcaasusu | 3593 |
| D-2499 | [GalNAc3]suaacucUfaAfGfAfUfcugaugasus{invAb} | 3266 | usCfsaucaGfaucuuaGfaGfuuasusu | 3594 |
| D-2500 | [GalNAc3]sgucucaAfuGfCfUfUfcaauguusus{invAb} | 3267 | asAfscauuGfaagcauUfgAfgacsusu | 3595 |
| D-2501 | [GalNAc3]saauagcagAfcUfUfGfUfuccgacs{invAb} | 3268 | asGfsucggAfacaaGfuCfugcuauususu | 3596 |
| D-2502 | [GalNAc3]sccccguuuAfaCfUfGfAfuuauggs{invAb} | 3269 | usCfscauaAfucagUfuAfaacggggsusu | 3597 |
| D-2503 | [GalNAc3]saugacaacAfcUfUfGfAfagcaugs{invAb} | 3270 | asCfsaugcUfucaaGfuGfuugucaususu | 3598 |
| D-2504 | [GalNAc3]suauugccaUfuUfUfGfUfccuuugs{invAb} | 3271 | usCfsaaagGfacaaAfaUfggcaauasusu | 3599 |
| D-2505 | [GalNAc3]suauaacucUfaAfGfAfUfcugaugs{invAb} | 3272 | usCfsaucaGfaucuUfaGfaguuauasusu | 3600 |
| D-2506 | [GalNAc3]sgugucucaAfuGfCfUfUfcaaugus{invAb} | 3273 | asAfscauuGfaagcAfuUfgagacacsusu | 3601 |
| D-2507 | [GalNAc3]saauagcagAfcUfUfGfUfuccgacs{invAb} | 3268 | asGfsucggAfacaaGfuCfuGfcuauususu | 3602 |
| D-2508 | [GalNAc3]sccccguuuAfaCfUfGfAfuuauggs{invAb} | 3269 | usCfscauaAfucagUfuAfaAfcggggsusu | 3603 |
| D-2509 | [GalNAc3]saugacaacAfcUfUfGfAfagcaugs{invAb} | 3270 | asCfsaugcUfucaaGfuGfuUfgucaususu | 3604 |
| D-2510 | [GalNAc3]suauugccaUfuUfUfGfUfccuuugs{invAb} | 3271 | usCfsaaagGfacaaAfaUfgGfcaauasusu | 3605 |
| D-2511 | [GalNAc3]suauaacucUfaAfGfAfUfcugaugs{invAb} | 3272 | usCfsaucaGfaucuUfaGfaGfuuauasusu | 3606 |
| D-2512 | [GalNAc3]sgugucucaAfuGfCfUfUfcaaugus{invAb} | 3273 | asAfscauuGfaagcAfuUfgAfgacacsusu | 3607 |
| D-2514 | gsusgaugGfcUfUfGfUfuccggaugs{invAb} | 3274 | asCfsauccGfgaacaaGfcCfaucsasc | 3608 |
| D-2515 | gsusgaugGfcUfUfGfUfugcagaugs{invAb} | 3275 | asCfsaucuGfcaacaaGfcCfaucsasc | 3609 |
| D-2516 | csasgaacGfaAfAfGfUfuaugugga{invAb} | 3276 | usUfsccacAfuaacuuUfcGfuucugsasa | 3610 |
| D-2517 | csasgaacGfaAfAfGfUfuguaugga{invAb} | 3277 | usUfsccauAfcaacuuUfcGfuucugsasa | 3611 |
| D-2518 | usasugucCfuGfGfAfAfuauaagaus{invAb} | 3278 | asAfsucuuAfuauuccAfgGfacauasusu | 3612 |
| D-2519 | usasugucCfuGfGfAfAfuguuagaus{invAb} | 3279 | asAfsucuaAfcauuccAfgGfacauasusu | 3613 |
| D-2520 | asusguccUfgGfAfAfUfauuggaugs{invAb} | 3280 | asCfsauccAfauauucCfaGfgacaususu | 3614 |
| D-2521 | asusguccUfgGfAfAfUfaauagaugs{invAb} | 3281 | asCfsaucuAfuuauucCfaGfgacaususu | 3615 |
| D-2522 | usgsuccuGfgAfAfUfAfuuaaaugcs{invAb} | 3282 | asGfscauuUfaauauuCfcAfggacasusu | 3616 |
| D-2523 | usgsuccuGfgAfAfUfAfuaagaugcs{invAb} | 3283 | asGfscaucUfuauauuCfcAfggacasusu | 3617 |
| D-2524 | cscsuggaAfuAfUfUfAfggugccuus{invAb} | 3284 | asGfsgcacCfuaauauUfcCfaggsusu | 3618 |
| D-2525 | cscsuggaAfuAfUfUfGfgaugccuus{invAb} | 3285 | asGfsgcauCfcaauauUfcCfaggsusu | 3619 |
| D-2526 | uscscuggAfaUfAfUfUfagaagccus{invAb} | 3286 | asAfsggcuUfcuaauaUfuCfcagsgsa | 3620 |
| D-2527 | uscscuggAfaUfAfUfUfaaaugccus{invAb} | 3287 | asAfsggcaUfuuaauaUfuCfcagsgsa | 3621 |
| D-2528 | cscsuggaAfuAfUfUfAfgauaccuus{invAb} | 3288 | asAfsagguAfucuaauAfuUfccaggsusu | 3622 |
| D-2529 | cscsuggaAfuAfUfUfAfggugccuus{invAb} | 3284 | asAfsaggcAfccuaauAfuUfccaggsusu | 3623 |
| D-2530 | csusggaaUfaUfUfAfGfauggcuuus{invAb} | 3289 | asAfsaagcCfaucuaaUfaUfuccagsusu | 3624 |
| D-2531 | csusggaaUfaUfUfAfGfaagccuuus{invAb} | 3290 | asAfsaaggCfuucuaaUfaUfuccagsusu | 3625 |
| D-2532 | gsasauauUfaGfAfUfGfccuauuaa{invAb} | 3291 | usUfsuaauAfggcaucUfaAfuauucsusu | 3626 |
| D-2533 | gsasauauUfaGfAfUfGfcguuuuaa{invAb} | 3292 | usUfsuaaaAfcgcaucUfaAfuauucsusu | 3627 |
| D-2534 | gsasugccUfuUfUfAfAfaaaaguucs{invAb} | 3293 | asGfsaacuUfuuuuaaAfaGfgcaucsusu | 3628 |
| D-2535 | gsasugccUfuUfUfAfAfagauguucs{invAb} | 3294 | asGfsaacaUfcuuuaaAfaGfgcaucsusu | 3629 |
| D-2536 | gsasuuuuCfaCfAfUfUfuuuggucus{invAb} | 3295 | asAfsgaccAfaaaaugUfgAfaaaucsusu | 3630 |
| D-2537 | gsasuuuuCfaCfAfUfUfuaucgucus{invAb} | 3296 | asAfsgacgAfuaaaugUfgAfaaaucsusu | 3631 |
| D-2538 | csuscaauGfcUfUfCfAfaugaccca{invAb} | 3297 | asUfsggguCfauugaaGfcAfuugagsusu | 3632 |
| D-2539 | csuscaauGfcUfUfCfAfaaguccca{invAb} | 3298 | asUfsgggaCfuuugaaGfcAfuugagsusu | 3633 |
| D-2540 | csasaugcUfuCfAfAfUfgucgcagus{invAb} | 3299 | asAfscugcGfacauUfgAfaGfcaususg | 3634 |
| D-2541 | csasaugcUfuCfAfAfUfgacccagus{invAb} | 3300 | asAfscuggGfucauUfgAfaGfcaususg | 3635 |
| D-2542 | asasauauAfgUfCfUfCfaaugacuus{invAb} | 3301 | usAfsagucAfuugagaCfuAfuauuususu | 3636 |
| D-2543 | asasauauAfgUfCfUfCfaguaacuus{invAb} | 3302 | usAfsaguuAfcugagaCfuAfuauuususu | 3637 |
| D-2544 | gscsaggaUfuCfUfGfAfaaagucccs{invAb} | 3303 | asGfsggacUfuuucagAfaUfccugcsusu | 3638 |
| D-2545 | gscsaggaUfuCfUfGfAfagacucccs{invAb} | 3304 | asGfsggagUfcuucagAfaUfccugcsusu | 3639 |
| D-2546 | usasccaaGfaGfCfGfCfagaguugcs{invAb} | 3305 | usGfscaacUfcugcgcUfcUfugguasusu | 3640 |
| D-2547 | usasccaaGfaGfCfGfCfaaacuugcs{invAb} | 3306 | usGfscaagUfuugcgcUfcUfugguasusu | 3641 |
| D-2548 | asgsgaaaGfcAfUfAfUfgucgguugs{invAb} | 3307 | asCfsaaccGfacauauGfcUfuuccususu | 3642 |
| D-2549 | asgsgaaaGfcAfUfAfUfgacaguugs{invAb} | 3308 | asCfsaacuGfucauauGfcUfuuccususu | 3643 |
| D-2550 | gsusuuaaAfaCfCfCfAfaaaucuaus{invAb} | 3309 | usAfsgauuUfuggguuUfuAfaacsusu | 3644 |
| D-2551 | gsusuuaaAfaCfCfCfGfauaucuaus{invAb} | 3310 | usAfsgauaUfcggguuUfuAfaacsusu | 3645 |
| D-2552 | ususaacuGfaUfUfGfUfauagcucus{invAb} | 3311 | usAfsgagcUfauacaaUfcAfguuaasusu | 3646 |
| D-2553 | ususaacuGfaUfUfGfUfaaaacucus{invAb} | 3312 | usAfsgaguUfuuacaaUfcAfguuaasusu | 3647 |
| D-2554 | usasacucUfaAfGfAfUfcuggugaa{invAb} | 3313 | asUfsucacCfagaucuUfaGfagususa | 3648 |
| D-2555 | usasacucUfaAfGfAfUfcagaugaa{invAb} | 3314 | asUfsucauCfugaucuUfaGfagususa | 3649 |
| D-2556 | ascsucuaAfgAfUfCfUfgauaaagus{invAb} | 3315 | usAfscuuuAfucagauCfuUfagagususu | 3650 |
| D-2557 | ascsucuaAfgAfUfCfUfggugaagus{invAb} | 3316 | usAfscuucAfccagauCfuUfagagususu | 3651 |
| D-2558 | usasuugccaUfuUfUfGfUfcguuugs{invAb} | 3317 | usCfsaaacGfacaaAfaUfgGfcaauausu | 3652 |
| D-2559 | usasuugccaUfuUfUfGfAfccuuugs{invAb} | 3318 | usCfsaaagGfucaaAfaUfgGfcaauausu | 3653 |
| D-2560 | gscscauuUfuGfUfCfCfuuuaauua{invAb} | 3319 | asUfsaauuAfaaggacAfaAfauggcsusu | 3654 |
| D-2561 | gscscauuUfuGfUfCfCfuaugauua{invAb} | 3320 | asUfsaaucAfuaggacAfaAfauggcsusu | 3655 |

### Example 3. In Vitro Evaluation of mARC1 siRNA Molecules in a Cell-Based Assay

[0220] The mARC1 siRNA molecules having different sequences prioritized from the bioinformatics analyses described in Example 2 were screened for efficacy in reducing human mARC1 mRNA using an RNA FISH (fluorescence in situ hybridization) assay. Hep3B cells (purchased from ATCC) were cultured in Eagle's Minimum Essential Medium (EMEM) (ATCC 30-2003) supplemented with 10% fetal bovine serum (FBS, Sigma) and 1% penicillin-streptomycin (P-S, Corning). siRNAs were transfected into cells by reverse transfection using Lipofectamine RNAiMAX transfection reagent (Thermo Fisher Scientific). The mARC1 siRNA molecules were tested in a 10-point dose response format, 3-fold dilutions, ranging from 500 nM to 25 pM (run 1), 25 nM to 1 pM (run 2), or 100 nM to 5 pM (run 3), final concentrations. 1 μL of the test siRNA molecule or phosphate-buffered saline (PBS) vehicle and 4 μL of base EMEM without supplements were added to PDL-coated CellCarrier-384 Ultra assay plates (PerkinElmer) by a Bravo automated liquid handling platform (Agilent). 5 μL of Lipofectamine RNAiMAX (Thermo Fisher Scientific), pre-diluted in base EMEM without supplements (0.035 μL of RNAiMAX in 5 μL EMEM), was then dispensed into the assay plates by a Multidrop Combi reagent dispenser (Thermo Fisher Scientific). After 20-minute incubation of the siRNA/RNAiMAX mixture at room temperature (RT), 30 μL of Hep3B cells (2000 cells per well) in EMEM supplemented with 10% FBS and 1% P-S were added to the transfection complex using a Multidrop Combi reagent dispenser. The assay plates were incubated at RT for 20 mins prior to being placed in an incubator. Cells were incubated for 72 hrs at 37° C. and 5% CO₂. RNA FISH assay was performed 72 hours after siRNA transfection using the manufacturer's assay reagents and protocol (QuantiGene® ViewRNA HC Screening Assay from Thermo Fisher Scientific) on an in-house assembled automated FISH assay platform. In brief, cells were fixed in 4% formaldehyde (Thermo Fisher Scientific) for 15 mins at RT, permeabilized with detergent for 3 mins at RT and then treated with protease solution for 10 mins at RT. Target-specific probes (Thermo Fisher Scientific) or vehicle (target probe diluent without target probes as negative control) were incubated for 3 hours, whereas preamplifiers, amplifiers, and label probes were incubated for 1 hour each. All hybridization steps were carried out at 40° C. in a Cytomat 2 C-LIN automated incubator (Thermo Fisher Scientific). After hybridization reactions, cells were stained for 30 mins with Hoechst and CellMask Blue (Thermo Fisher Scientific) and then imaged on an Opera Phenix high-content screening system (PerkinElmer). The images were analyzed using a Columbus image data storage and analysis system (PerkinElmer) to obtain the mean spot count per cell. The mean spot count per cell was normalized using the high (PBS with target probes) and low (PBS without target probes) control wells. The normalized values against the total siRNA concentrations were plotted and the data were fit to a four-parameter sigmoidal model using Genedata Screener data analysis software (Genedata) to obtain IC50 and maximum activity values. If the data could not be fit to the model, an IC50 value was not calculated and only a maximum activity value was reported.

[0221] The mARC1 siRNA molecules were initially screened in a first run at ten different concentrations ranging from 500 nM to 25 pM. siRNA molecules exhibiting significant activity in the first run were screened in second and third runs at ten different concentrations over narrower concentration ranges (run 2: 25 nM to 1 pM; run 3: 100 nM to 5 pM). The results of the assays for all three runs are shown in Table 3 below.

TABLE 3
In vitro inhibition of human mARC1 mRNA in Hep3B cells

| | Run 1 | | Run 2 | | Run 3 | |
|---|---|---|---|---|---|---|
| | (500 nM to 25 pM) | | (25 nM to 1 pM) | | (100 nM to 5 pM) | |
| Duplex | IC50 | Max | IC50 | Max | IC50 | Max |
| No. | [M] | Activity | [M] | Activity | [M] | Activity |
| D-1092 | 1.64E−10 | −96.0 | 1.60E−09 | −93.0 | 2.43E−09 | −96.5 |
| D-1093 | 1.03E−10 | −89.5 | 1.19E−09 | −90.9 | 9.30E−10 | −95.8 |
| D-1139 | 3.44E−10 | −87.1 | 2.43E−09 | −93.7 | 2.35E−09 | −90.6 |
| D-1061 | 3.44E−11 | −89.0 | 9.04E−10 | −90.5 | 1.79E−09 | −93.0 |
| D-1138 | 1.13E−10 | −89.9 | 2.19E−09 | −87.9 | 1.60E−09 | −92.4 |
| D-1095 | 1.27E−10 | −86.9 | 1.34E−09 | −86.5 | 1.28E−09 | −92.4 |
| D-1191 | — | −93.5 | 1.06E−09 | −91.7 | 8.45E−10 | −86.4 |
| D-1180 | 1.52E−10 | −86.2 | 1.41E−09 | −88.3 | 2.15E−09 | −89.6 |
| D-1090 | 1.26E−10 | −88.1 | 1.42E−09 | −87.6 | 2.10E−09 | −89.5 |
| D-1062 | 3.36E−11 | −88.5 | 1.15E−09 | −87.9 | 1.01E−09 | −89.0 |
| D-1177 | 5.02E−11 | −81.0 | 1.43E−09 | −90.2 | 2.33E−09 | −86.5 |
| D-1083 | 6.31E−10 | −87.8 | 1.88E−09 | −84.8 | 1.19E−09 | −91.8 |
| D-1245 | 1.04E−10 | −83.9 | 4.46E−10 | −87.6 | 2.19E−09 | −88.5 |
| D-1067 | — | −79.8 | 1.41E−09 | −85.5 | 9.69E−10 | −90.3 |
| D-1143 | — | −92.8 | 1.49E−09 | −85.2 | 2.41E−09 | −90.3 |
| D-1170 | 1.87E−10 | −86.4 | 1.21E−09 | −86.0 | 9.50E−10 | −89.1 |
| D-1044 | 4.69E−11 | −81.3 | 1.45E−09 | −89.4 | 1.03E−09 | −85.6 |
| D-1096 | 7.11E−11 | −91.0 | 5.60E−10 | −82.5 | 8.71E−10 | −91.8 |
| D-1113 | 1.15E−10 | −85.9 | 1.56E−09 | −87.1 | 1.39E−09 | −85.5 |
| D-1086 | 2.40E−10 | −83.5 | 2.26E−09 | −84.0 | 2.28E−09 | −88.5 |
| D-1256 | — | −88.9 | 6.08E−10 | −87.1 | 8.37E−10 | −85.2 |
| D-1189 | 1.50E−10 | −84.7 | 1.36E−09 | −85.4 | 2.08E−09 | −86.7 |
| D-1091 | 9.38E−11 | −88.8 | 2.12E−09 | −87.8 | 1.42E−09 | −84.2 |
| D-1174 | 1.50E−10 | −84.1 | 1.57E−09 | −85.5 | 2.53E−09 | −86.5 |
| D-1185 | 3.25E−11 | −86.6 | 4.67E−10 | −82.6 | 2.18E−09 | −88.6 |
| D-1066 | 4.91E−11 | −80.3 | 1.33E−09 | −86.7 | 1.21E−09 | −84.3 |
| D-1171 | — | −83.8 | 1.10E−09 | −88.0 | 1.01E−09 | −83.0 |
| D-1140 | 3.09E−10 | −87.8 | 2.64E−09 | −86.5 | 2.97E−09 | −84.0 |
| D-1130 | 1.76E−10 | −77.0 | 2.94E−09 | −88.9 | 2.36E−09 | −81.5 |
| D-1068 | 4.98E−11 | −80.1 | 1.40E−09 | −82.9 | 1.08E−09 | −87.5 |
| D-1243 | — | −90.2 | 6.70E−10 | −84.9 | 8.36E−10 | −85.4 |
| D-1074 | 6.75E−11 | −76.5 | 1.01E−09 | −85.8 | 1.41E−09 | −83.7 |
| D-1150 | 1.78E−10 | −87.5 | 1.21E−09 | −84.3 | 2.11E−09 | −84.7 |
| D-1249 | 2.48E−11 | −85.1 | 1.03E−09 | −84.2 | 2.11E−09 | −84.5 |
| D-1111 | 6.71E−11 | −87.3 | 1.10E−09 | −85.4 | 1.52E−09 | −82.9 |
| D-1230 | 3.95E−11 | −83.7 | 9.01E−10 | −84.7 | 1.20E−09 | −83.5 |
| D-1087 | 2.03E−10 | −83.3 | 1.75E−09 | −85.3 | 1.76E−09 | −82.9 |
| D-1099 | 4.39E−11 | −79.6 | 1.82E−09 | −84.8 | 1.16E−09 | −82.9 |
| D-1190 | 1.47E−10 | −82.9 | 1.15E−09 | −84.8 | 2.01E−09 | −82.8 |
| D-1236 | 2.72E−10 | −85.2 | 1.20E−09 | −85.3 | 2.14E−09 | −82.2 |
| D-1184 | 1.62E−10 | −81.3 | 2.24E−09 | −81.8 | 2.43E−09 | −85.6 |
| D-1228 | — | −83.3 | 5.73E−10 | −78.9 | 5.66E−10 | −87.3 |
| D-1220 | 5.60E−10 | −86.0 | 2.05E−09 | −80.8 | 9.99E−10 | −85.1 |
| D-1204 | 4.99E−11 | −79.7 | 1.84E−09 | −78.9 | 2.51E−09 | −87.0 |
| D-1179 | 7.45E−11 | −81.8 | 1.64E−09 | −86.5 | 1.26E−09 | −78.1 |
| D-1147 | 3.64E−10 | −85.0 | 8.60E−10 | −89.7 | 2.85E−09 | −73.8 |
| D-1097 | 3.39E−10 | −86.6 | 2.97E−09 | −85.2 | 3.27E−09 | −78.0 |
| D-1194 | 1.31E−10 | −78.9 | 1.40E−09 | −71.2 | 2.49E−09 | −86.3 |
| D-1054 | 1.63E−10 | −66.3 | 1.89E−09 | −85.2 | 4.36E−09 | −71.2 |
| D-1176 | 4.61E−11 | −74.7 | 1.34E−09 | −67.1 | 1.55E−09 | −85.1 |
| D-1215 | 1.08E−10 | −85.0 | 1.53E−09 | −84.5 | 2.35E−09 | −82.4 |
| D-1166 | 8.24E−11 | −84.0 | 1.94E−09 | −84.2 | 2.39E−09 | −82.4 |
| D-1213 | 4.13E−11 | −73.9 | 5.89E−10 | −84.3 | 1.23E−09 | −82.1 |
| D-1187 | 1.55E−10 | −87.9 | 2.30E−09 | −82.7 | 2.25E−09 | −83.3 |
| D-1210 | — | — | 2.12E−09 | −82.4 | 1.93E−09 | −83.5 |
| D-1209 | 1.10E−10 | −78.7 | 1.81E−09 | −82.3 | 1.84E−09 | −83.0 |
| D-1246 | 5.28E−11 | −77.0 | 5.07E−10 | −84.1 | 2.19E−09 | −80.4 |
| D-1257 | — | −82.1 | 9.40E−10 | −80.7 | 2.03E−09 | −83.4 |
| D-1020 | 1.18E−10 | −78.3 | 2.53E−09 | −84.8 | 1.79E−09 | −78.9 |
| D-1168 | 3.87E−11 | −84.5 | 1.32E−09 | −82.0 | 8.52E−10 | −81.5 |
| D-1241 | 2.42E−10 | −81.0 | 1.92E−09 | −81.2 | 2.63E−09 | −81.9 |
| D-1255 | 2.93E−11 | −80.7 | 1.27E−09 | −80.4 | 1.24E−09 | −82.5 |
| D-1181 | 2.85E−10 | −85.0 | 1.30E−09 | −78.1 | 1.69E−09 | −84.6 |
| D-1252 | — | −81.6 | 8.95E−10 | −78.4 | 2.22E−09 | −84.3 |
| D-1172 | 9.64E−11 | −78.7 | 1.51E−09 | −83.3 | 1.04E−09 | −79.2 |
| D-1175 | 6.64E−11 | −76.8 | 1.28E−09 | −80.9 | 2.21E−09 | −81.5 |
| D-1235 | 2.60E−10 | −83.0 | 1.66E−09 | −81.3 | 2.63E−09 | −80.8 |
| D-1229 | 1.30E−10 | −82.5 | 6.74E−10 | −84.3 | 1.29E−09 | −77.9 |
| D-1070 | — | −80.2 | 1.32E−09 | −81.7 | 1.48E−09 | −79.9 |
| D-1203 | 9.51E−11 | −80.8 | 1.73E−09 | −82.0 | 2.51E−09 | −78.4 |
| D-1183 | 1.14E−10 | −76.4 | 9.71E−10 | −81.9 | 2.10E−09 | −78.3 |
| D-1050 | 5.15E−11 | −87.0 | 1.30E−09 | −83.6 | 1.22E−09 | −76.7 |
| D-1167 | 2.87E−11 | −76.6 | 5.21E−10 | −79.4 | 1.14E−09 | −80.8 |
| D-1164 | 3.14E−10 | −87.8 | 1.75E−09 | −81.6 | 2.49E−09 | −78.4 |
| D-1237 | 9.94E−10 | −78.1 | 1.88E−09 | −80.7 | 2.19E−09 | −79.0 |
| D-1247 | 2.30E−11 | −78.7 | 8.40E−10 | −77.1 | 2.03E−09 | −82.3 |
| D-1075 | 1.17E−10 | −73.8 | 1.90E−09 | −84.5 | 1.00E−09 | −74.9 |
| D-1211 | 6.67E−11 | −72.9 | 1.52E−09 | −75.0 | 3.10E−09 | −84.0 |
| D-1248 | 3.22E−11 | −83.3 | 8.91E−10 | −80.6 | 1.37E−09 | −77.8 |
| D-1250 | 5.19E−11 | −77.3 | 6.63E−10 | −77.5 | 2.30E−09 | −80.8 |
| D-1069 | 8.02E−11 | −78.9 | 1.81E−09 | −78.2 | 2.22E−09 | −80.1 |
| D-1253 | — | −81.2 | 4.63E−10 | −77.9 | 2.21E−09 | −80.3 |
| D-1056 | 6.68E−11 | −76.7 | 2.02E−09 | −78.4 | 1.48E−09 | −79.6 |
| D-1079 | 8.81E−11 | −66.6 | 1.23E−09 | −78.5 | 1.70E−09 | −79.2 |
| D-1162 | 6.89E−11 | −77.8 | 2.08E−09 | −83.7 | 2.24E−09 | −73.5 |
| D-1045 | 7.98E−11 | −71.8 | 2.14E−09 | −78.6 | 1.63E−09 | −78.5 |
| D-1173 | 1.41E−10 | −84.6 | 1.70E−09 | −77.0 | 2.35E−09 | −80.0 |
| D-1182 | 6.61E−11 | −90.2 | 3.09E−09 | −81.5 | 2.92E−09 | −75.4 |
| D-1146 | 1.18E−10 | −77.7 | 3.39E−09 | −77.3 | 3.03E−09 | −79.2 |
| D-1244 | 7.71E−11 | −74.6 | 8.53E−10 | −78.7 | 2.23E−09 | −77.8 |
| D-1186 | 1.07E−10 | −71.3 | 1.03E−09 | −77.5 | 2.35E−09 | −78.9 |
| D-1258 | 1.60E−10 | −76.9 | 1.42E−09 | −77.4 | 2.26E−09 | −78.7 |
| D-1043 | 8.57E−10 | −81.2 | 3.33E−09 | −71.8 | 9.87E−09 | −83.9 |
| D-1163 | 3.85E−11 | −87.7 | 1.85E−10 | −80.1 | 2.11E−09 | −75.4 |
| D-1206 | 1.35E−10 | −78.8 | 1.62E−09 | −77.8 | 1.91E−09 | −77.5 |
| D-1089 | 2.34E−10 | −84.6 | 2.27E−09 | −81.6 | 2.51E−09 | −73.7 |
| D-1207 | 2.94E−11 | −74.0 | 1.54E−09 | −77.6 | 1.40E−09 | −77.6 |
| D-1202 | 3.74E−11 | −67.6 | 1.31E−09 | −77.0 | 1.47E−09 | −78.3 |
| D-1221 | 1.77E−10 | −84.4 | 2.08E−09 | −79.4 | 3.46E−09 | −75.7 |
| D-1212 | 6.59E−11 | −77.9 | 2.20E−09 | −77.9 | 2.18E−09 | −77.0 |
| D-1188 | 2.07E−10 | −84.5 | 1.62E−09 | −70.6 | 1.57E−09 | −83.7 |
| D-1037 | 3.48E−10 | −80.6 | 2.28E−09 | −76.3 | 2.12E−09 | −77.5 |
| D-1251 | 3.53E−11 | −78.2 | 6.32E−10 | −77.3 | 2.00E−09 | −76.0 |
| D-1148 | 9.64E−11 | −86.5 | 1.80E−09 | −76.0 | 1.41E−09 | −77.0 |
| D-1214 | 4.88E−11 | −71.7 | 1.72E−09 | −75.4 | 6.69E−10 | −77.6 |
| D-1046 | 2.18E−10 | −70.4 | 3.35E−09 | −84.0 | 4.63E−09 | −68.4 |
| D-1051 | 1.12E−10 | −72.4 | 1.53E−09 | −78.6 | 1.05E−09 | −73.6 |
| D-1112 | 6.34E−11 | −67.5 | 1.80E−09 | −77.6 | 2.24E−09 | −74.7 |
| D-1114 | 7.18E−11 | −75.2 | 1.66E−09 | −75.0 | 2.27E−09 | −77.1 |
| D-1149 | 2.18E−10 | −76.5 | 1.86E−09 | −80.9 | 2.15E−09 | −71.0 |
| D-1119 | 8.91E−11 | −73.1 | 3.58E−09 | −78.6 | 5.56E−09 | −73.4 |
| D-1126 | 1.04E−10 | −82.6 | 2.07E−09 | −70.7 | 2.02E−09 | −81.1 |
| D-1254 | 6.11E−11 | −81.4 | 1.45E−09 | −73.5 | 2.37E−09 | −78.2 |
| D-1219 | 5.51E−11 | −72.2 | 1.85E−09 | −77.9 | 2.36E−09 | −73.8 |
| D-1134 | 2.91E−10 | −75.9 | 1.69E−09 | −77.5 | 2.11E−09 | −73.4 |
| D-1023 | 1.49E−10 | −86.2 | 2.22E−09 | −74.7 | 2.97E−09 | −76.1 |
| D-1201 | 9.75E−11 | −69.6 | 2.02E−09 | −71.0 | 2.77E−09 | −79.0 |
| D-1059 | — | −66.9 | 2.32E−09 | −77.5 | 1.80E−09 | −72.2 |
| D-1195 | — | — | 1.48E−09 | −71.7 | 5.53E−10 | −77.5 |
| D-1160 | 1.39E−10 | −78.9 | 5.70E−10 | −66.1 | 1.70E−09 | −82.5 |
| D-1141 | 4.31E−10 | −81.0 | 4.03E−09 | −74.1 | 3.60E−09 | −73.9 |
| D-1137 | 1.93E−10 | −81.6 | 3.29E−09 | −65.3 | 6.20E−09 | −82.5 |
| D-1260 | 6.31E−11 | −69.6 | 1.51E−09 | −74.8 | 5.40E−09 | −72.4 |
| D-1073 | — | −77.7 | 1.78E−09 | −75.5 | 1.90E−09 | −71.6 |
| D-1178 | 4.29E−10 | −73.4 | 4.35E−09 | −67.2 | 8.66E−09 | −79.1 |
| D-1157 | 3.87E−10 | −74.0 | — | −70.6 | 7.10E−09 | −75.3 |
| D-1047 | 1.26E−10 | −74.5 | 2.58E−09 | −76.4 | 2.69E−09 | −69.0 |
| D-1161 | 5.65E−11 | −76.8 | 1.10E−09 | −61.9 | 2.17E−09 | −83.5 |
| D-1098 | 4.18E−10 | −86.1 | — | −68.2 | 3.05E−09 | −75.3 |
| D-1081 | 7.18E−11 | −67.3 | 2.33E−09 | −73.4 | 2.35E−09 | −69.6 |
| D-1240 | 8.69E−10 | −72.9 | 1.68E−09 | −69.4 | 1.86E−09 | −73.2 |
| D-1259 | 2.52E−11 | −70.1 | 7.91E−10 | −73.1 | 7.64E−10 | −69.3 |
| D-1120 | 3.48E−10 | −83.6 | 2.24E−09 | −71.1 | 2.52E−09 | −69.3 |
| D-1104 | 9.89E−11 | −64.0 | 2.73E−09 | −69.8 | 2.86E−09 | −70.5 |
| D-1225 | — | −68.8 | 1.17E−09 | −65.3 | 2.11E−09 | −74.4 |
| D-1052 | 3.31E−11 | −70.1 | 1.64E−09 | −69.5 | 9.63E−10 | −70.2 |
| D-1072 | — | −75.6 | 2.14E−09 | −71.8 | 1.53E−09 | −67.7 |
| D-1082 | 1.54E−10 | −70.1 | 2.11E−09 | −72.4 | 2.47E−09 | −67.2 |
| D-1224 | 9.53E−11 | −80.0 | 2.19E−09 | −67.3 | 2.87E−09 | −70.3 |
| D-1032 | 1.35E−10 | −89.8 | 3.18E−09 | −73.1 | 2.64E−09 | −64.3 |
| D-1017 | 1.16E−10 | −69.3 | 2.49E−09 | −69.6 | 1.90E−09 | −66.5 |
| D-1208 | 1.46E−10 | −67.5 | 2.45E−09 | −64.3 | 3.96E−09 | −71.7 |
| D-1048 | 2.86E−10 | −67.2 | 3.12E−09 | −70.4 | 2.60E−09 | −65.6 |
| D-1080 | 1.19E−10 | −55.0 | 3.84E−09 | −75.4 | 1.82E−09 | −59.2 |
| D-1102 | 4.22E−11 | −64.6 | 2.07E−09 | −70.8 | 1.97E−09 | −63.8 |
| D-1076 | 1.18E−10 | −57.7 | 2.38E−09 | −62.5 | 2.29E−09 | −71.5 |
| D-1055 | — | −47.6 | 2.89E−09 | −64.5 | 5.23E−09 | -69.2 |
| D-1216 | 1.83E−10 | −70.6 | 4.14E−09 | −67.1 | 3.59E−09 | −66.2 |
| D-1193 | 1.79E−10 | −82.0 | 1.40E−09 | −60.6 | 4.45E−09 | −72.5 |
| D-1217 | 2.58E−10 | −67.5 | 3.12E−09 | −60.9 | 4.77E−09 | −71.1 |
| D-1200 | 1.40E−10 | −70.4 | 3.63E−09 | −64.5 | 4.11E−09 | −67.1 |
| D-1058 | 1.46E−10 | −52.8 | 2.63E−09 | −65.4 | 1.94E−09 | −65.7 |
| D-1084 | 1.13E−10 | −75.6 | 1.98E−09 | −71.5 | 2.19E−09 | −59.4 |
| D-1118 | 3.51E−10 | −75.1 | 2.94E−09 | −65.1 | 6.26E−09 | −65.0 |
| D-1136 | 1.63E−10 | −65.7 | 3.06E−09 | −65.6 | 3.20E−09 | −63.3 |
| D-1116 | 3.67E−10 | −76.6 | 3.95E−09 | −58.9 | 3.33E−09 | −69.4 |
| D-1169 | 1.79E−10 | −72.8 | 1.99E−09 | −53.5 | 4.33E−09 | −74.5 |
| D-1065 | 1.57E−10 | −60.6 | 1.91E−09 | −64.1 | 2.14E−09 | −63.5 |
| D-1063 | 2.80E−11 | −65.2 | 1.38E−09 | −63.2 | 1.26E−09 | −63.1 |
| D-1034 | 1.45E−10 | −68.7 | 1.87E−09 | −62.6 | 1.70E−09 | −60.7 |
| D-1218 | 2.05E−10 | −62.9 | 2.21E−09 | −58.8 | 2.67E−09 | −63.7 |
| D-1154 | 1.84E−10 | −69.2 | 2.55E−09 | −55.5 | 3.44E−09 | −66.0 |
| D-1049 | 3.04E−10 | −70.7 | 2.10E−09 | −69.9 | 2.53E−09 | −51.4 |
| D-1088 | 5.85E−10 | −73.7 | 3.65E−09 | −58.6 | 3.15E−09 | −62.6 |
| D-1199 | 3.95E−10 | −73.2 | 2.70E−09 | −55.1 | 4.45E−09 | −64.4 |
| D-1165 | 2.02E−10 | −72.7 | — | −52.5 | 4.14E−09 | −66.5 |
| D-1028 | 1.82E−09 | −84.0 | 5.79E−09 | −51.0 | 1.80E−08 | −64.3 |
| D-1078 | 1.53E−10 | −55.4 | 1.97E−09 | −54.0 | 4.95E−09 | −60.8 |
| D-1222 | 1.82E−10 | −59.9 | 2.33E−09 | −60.4 | 2.18E−09 | −54.4 |
| D-1131 | 6.25E−10 | −75.0 | 5.53E−09 | −56.9 | 5.17E−09 | −57.8 |
| D-1027 | 6.87E−11 | −66.4 | 1.94E−09 | −51.6 | 2.22E−09 | −63.1 |
| D-1151 | 1.39E−10 | −59.0 | 2.21E−09 | −52.8 | 1.89E−09 | −61.2 |
| D-1135 | 2.33E−10 | −61.2 | 4.03E−09 | −56.0 | 5.09E−09 | −56.9 |
| D-1038 | — | −35.4 | 3.59E−09 | −73.4 | 7.37E−09 | −36.7 |
| D-1196 | 1.37E−10 | −57.4 | 3.05E−09 | −49.5 | 3.84E−09 | −58.0 |
| D-1223 | 1.38E−10 | −63.6 | 2.96E−09 | −54.8 | 2.75E−09 | −44.6 |
| D-1100 | 8.61E−11 | −46.0 | 2.94E−09 | −54.5 | 1.94E−09 | −43.5 |
| D-1197 | 1.96E−10 | −53.9 | 3.68E−09 | −49.1 | 5.22E−09 | −46.9 |
| D-1205 | 2.98E−10 | −67.1 | 2.83E−09 | −50.0 | 4.84E−09 | −43.7 |
| D-1192 | — | −84.6 | >25E−9 | −5.1 | 2.17E−09 | −82.6 |
| D-1024 | 8.25E−10 | −71.0 | 3.63E−09 | −52.2 | >100E−9 | −34.5 |
| D-1231 | 2.40E−09 | −74.7 | 6.04E−09 | −37.4 | 1.15E−08 | −45.5 |
| D-1031 | 9.42E−11 | −43.6 | — | −38.0 | 6.12E−09 | −41.0 |
| D-1103 | 6.03E−11 | −67.1 | >25E−9 | −2.0 | 1.77E−09 | −60.0 |
| D-1132 | 2.93E−10 | −79.2 | >25E−9 | −2.4 | 2.87E−09 | −50.1 |
| D-1025 | — | −27.8 | >25E−9 | −21.9 | >100E−9 | −20.8 |
| D-1004 | >500E−9 | −5.3 | — | — | — | — |
| D-1005 | >500E−9 | −8.5 | — | — | — | — |
| D-1006 | >500E−9 | 17.0 | — | — | — | — |
| D-1007 | >500E−9 | 38.0 | — | — | — | — |
| D-1008 | >500E−9 | 4.8 | — | — | — | — |
| D-1009 | >500E−9 | −2.1 | — | — | — | — |
| D-1010 | >500E−9 | 9.8 | — | — | — | — |
| D-1011 | >500E−9 | −6.4 | — | — | — | — |
| D-1012 | >500E−9 | 39.7 | — | — | — | — |
| D-1013 | >500E−9 | 37.7 | — | — | — | — |
| D-1014 | >500E−9 | −23.4 | — | — | — | — |
| D-1015 | 3.51E−10 | −57.4 | — | — | — | — |
| D-1016 | 2.06E−10 | −51.2 | — | — | — | — |
| D-1018 | >500E−9 | 1.9 | — | — | — | — |
| D-1019 | 2.61E−10 | −36.5 | — | — | — | — |
| D-1021 | 1.86E−10 | −39.0 | — | — | — | — |
| D-1022 | 2.63E−09 | −47.8 | — | — | — | — |
| D-1026 | >500E−9 | 21.9 | — | — | — | — |
| D-1029 | 2.61E−10 | −57.4 | — | — | — | — |
| D-1030 | 2.66E−10 | −55.4 | — | — | — | — |
| D-1033 | >500E−9 | 37.1 | — | — | — | — |
| D-1035 | 7.68E-10 | −57.2 | — | — | — | — |
| D-1036 | 5.91E-10 | −55.7 | — | — | — | — |
| D-1039 | >500E−9 | −18.2 | — | — | — | — |
| D-1040 | >500E−9 | −14.3 | — | — | — | — |
| D-1041 | >500E−9 | −18.8 | — | — | — | — |
| D-1042 | 3.74E−10 | −45.5 | — | — | — | — |
| D-1053 | >500E−9 | −17.6 | — | — | — | — |
| D-1057 | >500E−9 | −5.1 | — | — | — | — |
| D-1060 | >500E−9 | −3.6 | — | — | — | — |
| D-1064 | >500E−9 | 22.6 | — | — | — | — |
| D-1071 | >500E−9 | −6.8 | — | — | — | — |
| D-1077 | >500E−9 | −4.7 | — | — | — | — |
| D-1085 | >500E−9 | −0.4 | — | — | — | — |
| D-1094 | 3.76E−10 | −66.8 | — | — | — | — |
| D-1101 | >500E−9 | −3.5 | — | — | — | — |
| D-1105 | >500E−9 | −10.8 | — | — | — | — |
| D-1106 | 4.64E−10 | −53.1 | — | — | — | — |
| D-1107 | >500E−9 | −0.1 | — | — | — | — |
| D-1108 | >500E−9 | −7.8 | — | — | — | — |
| D-1109 | 7.32E−10 | −36.0 | — | — | — | — |
| D-1110 | >500E−9 | 1.0 | — | — | — | — |
| D-1115 | >500E−9 | −5.2 | — | — | — | — |
| D-1117 | 2.06E−10 | −41.7 | — | — | — | — |
| D-1121 | 2.62E−09 | −54.1 | — | — | — | — |
| D-1122 | 3.22E−10 | −65.9 | — | — | — | — |
| D-1123 | >500E−9 | 16.9 | — | — | — | — |
| D-1124 | 4.33E−10 | −56.1 | — | — | — | — |
| D-1128 | 3.74E−10 | −51.3 | — | — | — | — |
| D-1129 | >500E−9 | −24.9 | — | — | — | — |
| D-1133 | 6.33E−10 | −39.4 | — | — | — | — |
| D-1142 | 4.80E−10 | −65.9 | — | — | — | — |
| D-1144 | >500E−9 | 6.1 | — | — | — | — |
| D-1145 | >500E−9 | 2.0 | — | — | — | — |
| D-1152 | 7.09E−10 | −44.4 | — | — | — | — |
| D-1153 | 8.57E−08 | −48.1 | — | — | — | — |
| D-1155 | 1.48E−10 | −32.2 | — | — | — | — |
| D-1156 | >500E−9 | −8.3 | — | — | — | — |
| D-1158 | 1.94E−09 | −35.0 | — | — | — | — |
| D-1159 | 7.15E−10 | −67.2 | — | — | — | — |
| D-1198 | 3.37E−10 | −69.0 | — | — | — | — |
| D-1226 | >500E−9 | −2.5 | — | — | — | — |
| D-1227 | >500E−9 | 3.4 | — | — | — | — |
| D-1232 | 8.99E−10 | −61.4 | — | — | — | — |
| D-1233 | 1.19E−09 | −68.5 | — | — | — | — |
| D-1234 | 5.48E−10 | −65.1 | — | — | — | — |
| D-1238 | 1.51E−09 | −45.6 | — | — | — | — |
| D-1239 | 6.25E−10 | −67.1 | — | — | — | — |
| D-1242 | 6.22E−10 | −63.4 | — | — | — | — |
| D-1261 | >500E−9 | −19.1 | — | — | — | — |
| D-1262 | >500E−9 | −21.5 | — | — | — | — |

[0222] Of the initial 257 mARC1 siRNA molecules evaluated in the RNA FISH assay, 74 molecules exhibited an average of 80% or greater knockdown of human mARC1 mRNA and had IC50 values at least in the single-digit nanomolar range in assay runs 2 and 3. In particular, 32 molecules (duplex nos. D-1092; D-1093; D-1139; D-1061; D-1138; D-1095; D-1191; D-1180; D-1090; D-1062; D-1177; D-1083; D-1245; D-1067; D-1143; D-1170; D-1044; D-1096; D-1113; D-1086; D-1256; D-1189; D-1091; D-1174; D-1185; D-1066; D-1171; D-1140; D-1130; D-1068; D-1243; D-1074) reduced human mARC1 mRNA by at least 85% in one or both assay runs 2 and 3.

[0223] In a second series of experiments, additional mARC1 siRNA molecules were evaluated in the RNA FISH assay at ten different concentrations ranging from 100 nM to 5 pM, and IC50 and maximum activity values were calculated as described above. The results of the assays from this second series of experiments are shown in Table 4 below. Assays were repeated for a subset of molecules. For such molecules, the IC50 and maximum activity values for both runs are shown.

TABLE 4
In vitro inhibition of human mARC1 mRNA by select mARC1
siRNA molecules in Hep3B cells

| Duplex No. | IC50 [M] | Max Activity | Duplex No. | IC50 [M] | Max Activity |
|---|---|---|---|---|---|
| D-1061 | 663E−12 | −99.13 | D-1267-run 1 | 3.4E−9 | −80.64 |
| D-1093 | 720E−12 | −90.29 | D-1267-run 2 | 1.33E−09 | −83.64 |
| D-1139 | 1.72E−09 | −97.32 | D-1268-run 1 | 1.23E−9 | −88.75 |
| D-1220 | 3.26E−9 | −97.17 | D-1268-run 2 | 3.98E−10 | −89.45 |
| D-1245 | 93.3E−12 | −88.21 | D-1269 | >100E−9 | −32.26 |
| D-1263 | 3.9E−9 | −74.11 | D-1270 | 1.38E−9 | −56.38 |
| D-1264 | 1.4E−9 | −79.53 | D-1271 | >100E−9 | −26.78 |
| D-1265 | 2.68E−9 | −77.10 | D-1272-run 1 | 941E−12 | −84.38 |
| D-1266-run 1 | 541E−12 | −85.44 | D-1272-run 2 | 1.36E−09 | −89.35 |
| D-1266-run 2 | 1.61E−10 | −93.80 | D-1273-run 1 | 1.22E−9 | −85.29 |
| D-1274-run 1 | 638E−12 | −86.28 | D-1273-run 2 | 1.17E−09 | −90.43 |
| D-1274-run 2 | 8.95E−10 | −89.55 | D-1281-run 1 | 2.58E−9 | −86.39 |
| D-1275 | 428E−12 | −79.99 | D-1281-run 2 | 1.43E−09 | −88.37 |
| D-1276-run 1 | 1.54E−9 | −92.38 | D-1282-run 1 | 638E−12 | −87.53 |
| D-1276-run 2 | 1.59E−09 | −88.32 | D-1282-run 2 | 5.56E−10 | −95.34 |
| D-1277 | 2E−9 | −79.86 | D-1283-run 1 | 1.97E−9 | −80.62 |
| D-1278-run 1 | 1.21E−9 | −81.71 | D-1283-run 2 | 1.90E−09 | −81.20 |
| D-1278-run 2 | 1.55E−09 | −84.13 | D-1284-run 1 | 1.94E−9 | −91.35 |
| D-1279 | 323E−12 | −76.50 | D-1284-run 2 | 3.09E−09 | −91.61 |
| D-1280 | >100E−9 | 1.94 | D-1285-run 1 | 1E−9 | −88.21 |
| D-1286-run 1 | 2.04E−9 | −89.49 | D-1285-run 2 | 1.54E−09 | −86.72 |
| D-1286-run 2 | 2.42E−09 | −94.63 | D-1293 | — | −56.99 |
| D-1287-run 1 | 1.31E−9 | −82.87 | D-1294 | 2.72E−9 | −40.67 |
| D-1287-run 2 | 1.11E−09 | −83.35 | D-1295-run 1 | 3.86E−9 | −81.47 |
| D-1288-run 1 | 3.58E−9 | −88.81 | D-1295-run 2 | 4.77E−09 | −79.64 |
| D-1288-run 2 | 3.36E−09 | −90.32 | D-1296-run 1 | 1.29E−9 | −87.96 |
| D-1289 | 2.17E−9 | −73.71 | D-1296-run 2 | 1.97E−09 | −89.76 |
| D-1290 | 29.3E−9 | −50.69 | D-1297 | >100E−9 | 0.97 |
| D-1291 | 2.37E−9 | −62.67 | D-1298-run 1 | 636E−12 | −94.52 |
| D-1292-run 1 | 6.56E−9 | −81.82 | D-1298-run 2 | 4.99E−10 | −94.67 |
| D-1292-run 2 | 5.35E−09 | −75.91 | D-1299-run 1 | 293E−12 | −86.71 |
| D-1300 | 2.7E−9 | −79.68 | D-1299-run 2 | 6.23E−10 | −90.92 |
| D-1301 | >100E−9 | −46.76 | D-1308-run 1 | 1.61E−9 | −83.41 |
| D-1302 | 2.15E−9 | −80.01 | D-1308-run 2 | 1.28E−09 | −85.58 |
| D-1303-run 1 | 1.44E−9 | −85.61 | D-1309 | 405E−12 | −78.77 |
| D-1303-run 2 | 1.05E−09 | −88.46 | D-1310-run 1 | 1.83E−9 | −89.68 |
| D-1304-run 1 | 490E−12 | −85.23 | D-1310-run 2 | 1.91E−09 | −95.65 |
| D-1304-run 2 | 6.56E−10 | −88.62 | D-1311-run 1 | 1.05E−9 | −90.99 |
| D-1305 | 802E−12 | −79.34 | D-1311-run 2 | 8.00E−10 | −87.63 |
| D-1306 | 2.4E−9 | −77.95 | D-1312-run 1 | 2.26E−9 | −87.43 |
| D-1307 | 2.43E−9 | −77.80 | D-1312-run 2 | 1.65E−09 | −82.70 |
| D-1314 | 768E−12 | −76.88 | D-1313 | 1.85E−9 | −78.77 |
| D-1315-run 1 | 2.2E−9 | −88.75 | D-1322-run 1 | >100E−9 | −6.77 |
| D-1315-run 2 | 2.49E−09 | −83.37 | D-1322-run 2 | >100E−9 | −1.46 |
| D-1316 | 3.66E−9 | −71.22 | D-1323 | >100E−9 | 2.99 |
| D-1317 | 3.03E−9 | −69.28 | D-1324 | >100E−9 | −6.04 |
| D-1318 | 8.65E−9 | −59.48 | D-1325 | >100E−9 | 15.82 |
| D-1319-run 1 | 6.1E−9 | −82.28 | D-1326-run 1 | >100E−9 | −16.18 |
| D-1319-run 2 | 3.94E−09 | −79.12 | D-1326-run 2 | >100E−9 | −6.29 |
| D-1320 | 4.95E−9 | −70.44 | D-1327 | 6.21E−9 | −56.80 |
| D-1321-run 1 | 2.21E−9 | −84.41 | D-1328 | >100E−9 | −40.40 |
| D-1321-run 2 | 1.74E−09 | −79.23 | D-1329 | >100E−9 | −39.95 |
| D-1330-run 1 | 7.48E−9 | −82.11 | D-1335-run 1 | 1.15E−9 | −87.64 |
| D-1330-run 2 | 7.14E−09 | −78.69 | D-1335-run 2 | 9.61E−10 | −86.06 |
| D-1331-run 1 | 3.59E−9 | −65.41 | D-1336-run 1 | 2.62E−9 | −85.53 |
| D-1331-run 2 | 4.38E−9 | −65.82 | D-1336-run 2 | 1.58E−09 | −80.06 |
| D-1332-run 1 | >100E−9 | −11.88 | D-1337 | 4.88E−9 | −68.99 |
| D-1332-run 2 | >100E−9 | −8.78 | D-1338-run 1 | 2.16E−9 | −95.31 |
| D-1333-run 1 | 5.73E−9 | −60.02 | D-1338-run 2 | 2.44E−09 | −95.49 |
| D-1333-run 2 | 20.5E−9 | −72.67 | D-1339 | 5.6E−9 | −77.24 |
| D-1334-run 1 | 5.96E−9 | −86.77 | D-1340 | 3.77E−9 | −67.14 |
| D-1334-run 2 | 5.74E−9 | −70.29 | D-1341-run 1 | 1.27E−9 | −82.33 |
| D-1334-run 3 | 6.24E−09 | −79.62 | D-1341-run 2 | 1.22E−09 | −85.14 |
| D-1342 | 3.79E−9 | −79.64 | D-1351-run 1 | 2.49E−9 | −83.34 |
| D-1343 | 7.69E−9 | −76.38 | D-1351-run 2 | 2.06E−09 | −84.99 |
| D-1344 | 4.7E−9 | −80.14 | D-1352 | 2.29E−9 | −78.03 |
| D-1345 | >100E−9 | −33.98 | D-1353 | 2.4E−9 | −51.04 |
| D-1346 | 1.8E−9 | −67.30 | D-1354 | 1.99E−9 | −69.59 |
| D-1347 | 3.71E−9 | −72.82 | D-1355 | 3.05E−9 | −60.02 |
| D-1348 | 21.7E−9 | −58.27 | D-1356 | 5.45E−9 | −41.04 |
| D-1349 | 1.7E−9 | −78.63 | D-1357 | 2.85E−9 | −57.34 |
| D-1350-run 1 | 438E−12 | −86.65 | D-1358-run 1 | 967E−12 | −82.23 |
| D-1350-run 2 | 4.23E−10 | −82.90 | D-1358-run 2 | 1.17E−09 | −90.43 |
| D-1359 | 2.03E−9 | −70.00 | D-1366 | 4.75E−9 | −76.16 |
| D-1360-run 1 | 3.62E−9 | −87.34 | D-1367-run 1 | 2.26E−9 | −93.08 |
| D-1360-run 2 | 3.10E−09 | −83.45 | D-1367-run 2 | 1.98E−09 | −93.44 |
| D-1361 | 632E−12 | −76.77 | D-1368-run 1 | 2.82E−9 | −83.59 |
| D-1362 | 2.58E−9 | −76.67 | D-1368-run 2 | 1.12E−09 | −88.39 |
| D-1363-run 1 | 1.29E−9 | −91.72 | D-1369 | 2.11E−9 | −75.09 |
| D-1363-run 2 | 2.30E−09 | −91.91 | D-1370 | 1.96E−9 | −79.61 |
| D-1364-run 1 | 1.11E−9 | −87.19 | D-1371-run 1 | 1.19E−9 | −84.84 |
| D-1364-run 2 | 1.14E−09 | −91.01 | D-1371-run 2 | 1.14E−09 | −86.39 |
| D-1365-run 1 | 1.42E−9 | −85.38 | D-1372 | 1.38E−9 | −69.85 |
| D-1365-run 2 | 1.80E−09 | −88.72 | D-1373 | 2.62E−9 | −68.36 |
| D-1374 | 2.83E−9 | −78.50 | D-1380-run 1 | 2.43E−9 | −81.50 |
| D-1375-run 1 | 754E−12 | −91.87 | D-1380-run 2 | 2.13E−09 | −84.97 |
| D-1375-run 2 | 8.44E−10 | −89.51 | D-1381-run 1 | 202E−12 | −89.58 |
| D-1376-run 1 | 2.47E−9 | −85.68 | D-1381-run 2 | 3.79E−10 | −89.29 |
| D-1376-run 2 | 2.26E−09 | −85.67 | D-1382-run 1 | 429E−12 | −97.54 |
| D-1377-run 1 | 1.24E−9 | −83.02 | D-1382-run 2 | 2.17E−10 | −90.44 |
| D-1377-run 2 | 1.45E−09 | −88.30 | D-1383-run 1 | 939E−12 | −92.11 |
| D-1378 | 4.05E−9 | −53.31 | D-1383-run 2 | 7.75E−10 | −90.60 |
| D-1379-run 1 | 2.45E−9 | −85.07 | D-1384-run 1 | 29.6E−9 | −81.72 |
| D-1379-run 2 | 1.58E−09 | −87.92 | D-1384-run 2 | 1.62E−10 | −93.78 |
| D-1385-run 1 | 470E−12 | −84.34 | D-1390-run 1 | 587E−12 | −101.09 |
| D-1385-run 2 | 1.96E−10 | −85.42 | D-1390-run 2 | 2.46E−10 | −93.89 |
| D-1386-run 1 | 508E−12 | −93.47 | D-1391-run 1 | 206E−12 | −86.03 |
| D-1386-run 2 | 3.20E−10 | −93.01 | D-1391-run 2 | 1.91E−10 | −89.58 |
| D-1387-run 1 | 564E−12 | −93.18 | D-1392-run 1 | 602E−12 | −87.07 |
| D-1387-run 2 | 3.07E−10 | −90.08 | D-1392-run 2 | 8.32E−10 | −83.70 |
| D-1388-run 1 | 632E−12 | −92.58 | D-1393-run 1 | 1.28E−9 | −80.15 |
| D-1388-run 2 | 7.64E−10 | −95.22 | D-1393-run 2 | 8.95E−10 | −74.95 |
| D-1389-run 1 | 227E−12 | −94.67 | D-1394-run 1 | 1.72E−9 | −80.33 |
| D-1389-run 2 | 3.90E−10 | −95.16 | D-1394-run 2 | 1.05E−09 | −80.33 |
| D-1395-run 1 | 746E−12 | −88.44 | D-1400-run 1 | 1.17E−9 | −93.27 |
| D-1395-run 2 | 5.06E−10 | −77.24 | D-1400-run 2 | 6.99E−10 | −86.44 |
| D-1396-run 1 | 784E−12 | −92.23 | D-1401-run 1 | 753E−12 | −92.66 |
| D-1396-run 2 | 9.88E−10 | −86.55 | D-1401-run 2 | 6.27E−10 | −85.65 |
| D-1397-run 1 | 551E−12 | −86.58 | D-1402-run 1 | 411E−12 | −90.34 |
| D-1397-run 2 | 5.51E−10 | −84.90 | D-1402-run 2 | 1.29E−10 | −91.80 |
| D-1398-run 1 | 489E−12 | −80.69 | D-1403-run 1 | 771E−12 | −88.84 |
| D-1398-run 2 | 2.09E−10 | −86.47 | D-1403-run 2 | 4.78E−10 | −86.79 |
| D-1399-run 1 | 369E−12 | −86.49 | D-1404-run 1 | 421E−12 | −86.45 |
| D-1399-run 2 | 1.34E−10 | −93.52 | D-1404-run 2 | 4.48E−10 | −93.17 |
| D-1405-run 1 | 187E−12 | −91.82 | D-1412 | >100E−9 | −20.63 |
| D-1405-run 2 | 2.50E−10 | −95.68 | D-1413-run 1 | 5.18E−9 | −81.68 |
| D-1406-run 1 | 282E−12 | −88.00 | D-1413-run 2 | 3.13E−09 | −76.27 |
| D-1406-run 2 | 1.25E−10 | −91.00 | D-1414 | 2.02E−9 | −63.97 |
| D-1407-run 1 | 403E−12 | −91.27 | D-1415 | 3.84E−9 | −56.01 |
| D-1407-run 2 | 2.01E−10 | −82.75 | D-1416-run 1 | 1.94E−9 | −94.76 |
| D-1408 | >100E−9 | 19.37 | D-1416-run 2 | 1.47E−09 | −85.86 |
| D-1409 | >100E−9 | 44.69 | D-1417 | 5.26E−9 | −50.98 |
| D-1410 | >100E−9 | −16.05 | D-1418 | 5.94E−9 | −63.89 |
| D-1411 | >100E−9 | 10.66 | D-1419 | >100E−9 | −19.86 |
| D-1420-run 1 | 2.68E−9 | −94.55 | D-1428 | >100E−9 | 4.40 |
| D-1420-run 2 | 1.24E−09 | −86.57 | D-1429 | >100E−9 | −9.19 |
| D-1421-run 1 | 5.7E−9 | −89.95 | D-1430 | >100E−9 | 2.73 |
| D-1421-run 2 | 6.19E−09 | −84.56 | D-1431 | >100E−9 | −19.92 |
| D-1422 | 25.5E−9 | −53.28 | D-1432 | >100E−9 | −2.75 |
| D-1423 | 31.8E−9 | −62.33 | D-1433 | >100E−9 | −12.03 |
| D-1424 | >100E−9 | −30.24 | D-1434 | 4.58E−9 | −53.99 |
| D-1425 | >100E−9 | 19.38 | D-1435 | >100E−9 | 2.85 |
| D-1426 | >100E−9 | 1.22 | D-1436 | >100E−9 | −21.73 |
| D-1427 | >100E−9 | −8.72 | D-1437 | 9.37E−9 | −53.74 |
| D-1438 | 33.3E−9 | −33.44 | D-1445 | 7.92E−9 | −71.51 |
| D-1439-run 1 | 3.21E−9 | −88.80 | D-1446 | 100E−9 | −28.05 |
| D-1439-run 2 | 2.07E−09 | −86.97 | D-1447-run 1 | 4.6E−9 | −81.98 |
| D-1440 | 15.8E−9 | −53.11 | D-1447-run 2 | 1.92E−09 | −74.90 |
| D-1441-run 1 | 860E−12 | −93.62 | D-1448 | 754E−12 | −75.31 |
| D-1441-run 2 | 1.41E−09 | −92.60 | D-1449 | 1.61E−9 | −73.73 |
| D-1442 | 15.3E−9 | −60.48 | D-1450 | 1.91E−9 | −78.64 |
| D-1443 | 4.55E−9 | −61.60 | D-1451-run 1 | 1.41E−9 | −92.19 |
| D-1444-run 1 | 3.64E−9 | −80.44 | D-1451-run 2 | 1.61E−09 | −88.76 |
| D-1444-run 2 | 1.88E−09 | −75.71 | D-1452-run 1 | 477E−12 | −84.31 |
| D-1453 | 1.64E−9 | −77.22 | D-1452-run 2 | 5.50E−10 | −81.90 |
| D-1454-run 1 | 1.39E−9 | −87.14 | D-1459-run 1 | 845E−12 | −85.31 |
| D-1454-run 2 | 2.24E−09 | −87.40 | D-1459-run 2 | 1.24E−09 | −93.61 |
| D-1455-run 1 | 341E−12 | −86.11 | D-1460-run 1 | 702E−12 | −88.96 |
| D-1455-run 2 | 2.42E−10 | −95.21 | D-1460-run 2 | 9.15E−10 | −89.53 |
| D-1456-run 1 | 2.03E−9 | −86.90 | D-1461 | 1.49E−9 | −71.01 |
| D-1456-run 2 | 1.41E−09 | −84.06 | D-1462 | 7.37E−9 | −66.33 |
| D-1457 | 1.92E−9 | −78.57 | D-1463 | >100E−9 | −17.28 |
| D-1458-run 1 | 6.71E−9 | −86.68 | D-1464 | 7.58E−9 | −61.74 |
| D-1458-run 2 | 2.24E−09 | −94.33 | D-1465 | 5.16E−9 | −75.36 |
| D-1466 | >100E−9 | −17.33 | D-1475 | 9.72E−9 | −59.40 |
| D-1467 | 10.9E−9 | −56.04 | D-1476 | 1.08E−9 | −54.33 |
| D-1468 | 3.78E−9 | −61.93 | D-1477 | 2.27E−9 | −55.97 |
| D-1469-run 1 | 953E−12 | −81.14 | D-1478 | 1.15E−9 | −54.86 |
| D-1469-run 2 | 1.59E−09 | −83.63 | D-1479 | 1.33E−9 | −44.54 |
| D-1470 | 19.6E−9 | −41.41 | D-1480-run 1 | 2.03E−9 | −85.44 |
| D-1471 | 46.7E−9 | −37.18 | D-1480-run 2 | 8.61E−10 | −88.52 |
| D-1472 | 4.45E−9 | −50.43 | D-1481-run 1 | 1.57E−9 | −80.97 |
| D-1473 | 2.17E−9 | −78.87 | D-1481-run 2 | 1.33E−09 | −90.57 |
| D-1474 | 8.29E−9 | −61.78 | D-1482 | 6.26E−9 | −53.31 |
| D-1483 | 10.8E−9 | −73.64 | D-1489-run 1 | 2.49E−9 | −92.70 |
| D-1484 | 1.63E−9 | −80.04 | D-1489-run 2 | 2.02E−09 | −100.75 |
| D-1485-run 1 | 614E−12 | −86.35 | D-1490 | 7.08E−9 | −77.03 |
| D-1485-run 2 | 7.55E−10 | −90.60 | D-1491-run 1 | 1.31E−9 | −95.30 |
| D-1486-run 1 | 2.44E−9 | −81.67 | D-1491-run 2 | 9.32E−10 | −92.84 |
| D-1486-run 2 | 5.61E−10 | −85.95 | D-1492-run 1 | 470E−12 | −88.29 |
| D-1487-run 1 | 3.14E−9 | −92.01 | D-1492-run 2 | 6.96E−10 | −91.86 |
| D-1487-run 2 | 4.26E−10 | −90.53 | D-1493-run 1 | 2.72E−9 | −89.31 |
| D-1488-run 1 | 4.58E−9 | −82.33 | D-1493-run 2 | 2.25E−09 | −89.06 |
| D-1488-run 2 | 2.65E−09 | −80.98 | D-1494 | 2.08E−9 | −79.36 |
| D-1495 | 3.7E−9 | −63.78 | D-1502 | 12.3E−9 | −60.25 |
| D-1496-run 1 | 2.26E−9 | −82.93 | D-1503-run 1 | 1.35E−9 | −94.10 |
| D-1496-run 2 | 6.17E−10 | −86.34 | D-1503-run 2 | 8.46E−10 | −88.39 |
| D-1497-run 1 | 3.09E−9 | −83.24 | D-1504-run 1 | 2.62E−9 | −92.42 |
| D-1497-run 2 | 1.20E−09 | −89.93 | D-1504-run 2 | 2.39E−09 | −84.78 |
| D-1498 | 958E−12 | −79.10 | D-1505 | 12.1E−9 | −44.23 |
| D-1499-run 1 | 434E−12 | −82.58 | D-1506-run 1 | 2.33E−9 | −82.44 |
| D-1499-run 2 | 7.85E−10 | −86.02 | D-1506-run 2 | 2.43E−09 | −74.70 |
| D-1500 | 2.94E−9 | −64.87 | D-1507-run 1 | 7.22E−9 | −85.49 |
| D-1501 | 3.79E−9 | −67.10 | D-1507-run 2 | 3.07E−09 | −78.73 |
| D-1508 | 9.61E−9 | −69.25 | D-1516 | 4.11E−9 | −72.86 |
| D-1509-run 1 | 1.84E−9 | −87.02 | D-1517 | 1.86E−9 | −70.15 |
| D-1509-run 2 | 1.54E−09 | −90.33 | D-1518 | 5.19E−9 | −80.44 |
| D-1510-run 1 | 2E−9 | −84.70 | D-1519-run 1 | 3.16E−9 | −87.18 |
| D-1510-run 2 | 1.33E−09 | −74.09 | D-1519-run 2 | 1.85E−09 | −81.61 |
| D-1511 | 4.91E−9 | −70.77 | D-1520 | 2.61E−9 | −75.37 |
| D-1512 | 13.7E−9 | −50.81 | D-1521 | 8.95E−9 | −71.81 |
| D-1513 | 10.4E−9 | −61.35 | D-1522 | 1.05E−9 | −77.55 |
| D-1514 | 8.52E−9 | −58.65 | D-1523 | 5.61E−9 | −56.61 |
| D-1515-run 1 | 3.02E−9 | −94.07 | D-1524 | 8.18E−9 | −70.51 |
| D-1515-run 2 | 2.11E−09 | −88.32 | D-1525-run 1 | 187E−12 | −85.31 |
| D-1526-run 1 | 724E−12 | −88.90 | D-1525-run 2 | 3.09E−10 | −89.32 |
| D-1526-run 2 | 1.09E−10 | −93.08 | D-1533-run 1 | 160E−12 | −87.58 |
| D-1527 | 969E−12 | −79.47 | D-1533-run 2 | 1.77E−10 | −89.17 |
| D-1528-run 1 | 476E−12 | −81.98 | D-1534 | 4.12E−9 | −77.89 |
| D-1528-run 2 | 5.16E−10 | −86.43 | D-1535-run 1 | 3.91E−9 | −81.08 |
| D-1529 | 275E−12 | −80.46 | D-1535-run 2 | 2.53E−09 | −83.97 |
| D-1530 | 603E−12 | −79.76 | D-1536-run 1 | 1.17E−9 | −85.54 |
| D-1531-run 1 | 465E−12 | −81.21 | D-1536-run 2 | 5.45E−10 | −84.54 |
| D-1531-run 2 | 4.26E−10 | −86.14 | D-1537 | 5.53E−9 | −72.51 |
| D-1532-run 1 | 234E−12 | −82.79 | D-1538 | 869E−12 | −74.09 |
| D-1532-run 2 | 2.09E−10 | −88.87 | D-1539 | 6.85E−9 | −74.08 |
| D-1540-run 1 | 2.09E−9 | −83.12 | D-1548 | 27.6E−9 | −37.78 |
| D-1540-run 2 | 1.27E−09 | −88.11 | D-1549-run 1 | 1.04E−9 | −93.06 |
| D-1541 | 932E−12 | −76.06 | D-1549-run 2 | 8.95E−10 | −88.71 |
| D-1542-run 1 | 3.16E−9 | −81.16 | D-1550 | 652E−12 | −79.25 |
| D-1542-run 2 | 1.48E−09 | −83.09 | D-1551-run 1 | 500E−12 | −86.59 |
| D-1543 | 8.54E−9 | −79.76 | D-1551-run 2 | 5.64E−10 | −84.20 |
| D-1544 | 8.28E−9 | −73.28 | D-1552-run 1 | 228E−12 | −81.86 |
| D-1545 | 1.7E−9 | −75.05 | D-1552-run 2 | 3.22E−10 | −89.73 |
| D-1546 | 1.45E−9 | −79.08 | D-1553-run 1 | 931E−12 | −80.68 |
| D-1547 | 22.3E−9 | −69.31 | D-1553-run 2 | 8.28E−10 | −89.65 |
| D-1554 | 1.27E−9 | −78.63 | D-1560 | 456E−12 | −74.69 |
| D-1555-run 1 | 663E−12 | −88.13 | D-1561-run 1 | 2.39E−9 | −83.41 |
| D-1555-run 2 | 4.61E−10 | −90.35 | D-1561-run 2 | 3.83E−9 | −80.47 |
| D-1556-run 1 | 165E−12 | −83.51 | D-1561-run 3 | 2.15E−09 | −83.36 |
| D-1556-run 2 | 2.53E−10 | −87.06 | D-1562-run 1 | 1.1E−9 | −72.98 |
| D-1557-run 1 | 440E−12 | −87.71 | D-1562-run 2 | 1.26E−9 | −74.09 |
| D-1557-run 2 | 2.50E−10 | −85.00 | D-1563-run 1 | 898E−12 | −78.70 |
| D-1558-run 1 | 762E−12 | −81.35 | D-1563-run 2 | 1.07E−9 | −76.14 |
| D-1558-run 2 | 2.60E−10 | −80.18 | D-1564-run 1 | 906E−12 | −85.03 |
| D-1559-run 1 | 668E−12 | −87.94 | D-1564-run 2 | 1.75E−9 | −76.80 |
| D-1559-run 2 | 5.42E−10 | −86.43 | D-1564-run 3 | 1.01E−09 | −81.88 |
| D-1565-run 1 | 467E−12 | −79.91 | D-1570-run 1 | 925E−12 | −78.14 |
| D-1565-run 2 | 1.27E−9 | −78.07 | D-1570-run 2 | 992E−12 | −76.81 |
| D-1566-run 1 | 1.5E−9 | −80.84 | D-1571-run 1 | 779E−12 | −80.29 |
| D-1566-run 2 | 4.17E−9 | −85.05 | D-1571-run 2 | 2.7E−9 | −80.52 |
| D-1566-run 3 | 8.64E−10 | −84.74 | D-1571-run 3 | 8.27E−10 | −84.74 |
| D-1567-run 1 | 3.71E−9 | −75.99 | D-1572 | 820E−12 | −76.58 |
| D-1567-run 2 | 2.34E−9 | −72.76 | D-1573-run 1 | 1.52E−9 | −79.66 |
| D-1568 | 7.49E−9 | −49.04 | D-1573-run 2 | 3.19E−9 | −79.88 |
| D-1569-run 1 | 2.74E−9 | −78.08 | D-1574-run 1 | 4.19E−9 | −60.81 |
| D-1569-run 2 | 3.13E−9 | −74.70 | D-1574-run 2 | >100E−9 | −15.89 |
| D-1575-run 1 | 1.59E−9 | −76.35 | D-1579-run 1 | 515E−12 | −84.80 |
| D-1575-run 2 | 2.88E−9 | −71.95 | D-1579-run 2 | 207E−12 | −79.57 |
| D-1576-run 1 | 1.07E−9 | −90.18 | D-1579-run 3 | 2.98E−09 | −83.77 |
| D-1576-run 2 | 1.37E−09 | −94.66 | D-1580-run 1 | 233E−12 | −83.48 |
| D-1577-run 1 | 1.3E−9 | −83.26 | D-1580-run 2 | 3.19E−10 | −90.62 |
| D-1577-run 2 | 1.52E−9 | −80.99 | D-1581-run 1 | 376E−12 | −89.56 |
| D-1577-run 3 | 1.14E−09 | −85.26 | D-1581-run 2 | 164E−12 | −84.43 |
| D-1578-run 1 | 1.34E−9 | −84.03 | D-1581-run 3 | 4.10E−10 | −88.78 |
| D-1578-run 2 | 571E−12 | −77.18 | D-1582-run 1 | 1.25E−9 | −77.75 |
| D-1578-run 3 | 6.20E−10 | −79.39 | D-1582-run 2 | 1.38E−9 | −73.23 |
| D-1583-run 1 | 3.97E−9 | −79.12 | D-1589 | 1.89E−9 | −79.52 |
| D-1583-run 2 | 2.2E−9 | −78.20 | D-1590-run 1 | 1.56E−9 | −86.60 |
| D-1584-run 1 | 377E−12 | −84.12 | D-1590-run 2 | 9.85E−10 | −86.66 |
| D-1584-run 2 | 5.41E−10 | −86.04 | D-1591 | 1.01E−9 | −78.77 |
| D-1585-run 1 | 854E−12 | −83.31 | D-1592 | 1.67E−9 | −78.16 |
| D-1585-run 2 | 1.15E−09 | −89.54 | D-1593 | 3.47E−9 | −58.82 |
| D-1586 | 1.24E−9 | −76.28 | D-1594 | 2.08E−9 | −71.26 |
| D-1587-run 1 | 1.04E−9 | −87.24 | D-1595-run 1 | 531E−12 | −92.76 |
| D-1587-run 2 | 1.22E−09 | −90.08 | D-1595-run 2 | 4.46E−10 | −93.09 |
| D-1588-run 1 | 1.24E−9 | −82.16 | D-1596-run 1 | 655E−12 | −95.03 |
| D-1588-run 2 | 2.00E−09 | −84.12 | D-1596-run 2 | 6.71E−10 | −88.34 |
| D-1597-run 1 | 566E−12 | −87.01 | D-1603-run 1 | 868E−12 | −84.49 |
| D-1597-run 2 | 9.25E−10 | −86.25 | D-1603-run 2 | 1.25E−09 | −89.46 |
| D-1598-run 1 | 1.07E−9 | −81.80 | D-1604-run 1 | 1.03E−9 | −85.81 |
| D-1598-run 2 | 1.18E−09 | −77.57 | D-1604-run 2 | 8.37E−10 | −82.91 |
| D-1599-run 1 | 844E−12 | −85.25 | D-1605-run 1 | 831E−12 | −87.43 |
| D-1599-run 2 | 7.40E−10 | −79.77 | D-1605-run 2 | 7.85E−10 | −84.90 |
| D-1600 | 1.34E−9 | −65.29 | D-1606-run 1 | 617E−12 | −91.60 |
| D-1601 | 646E−12 | −71.11 | D-1606-run 2 | 9.69E−10 | −83.11 |
| D-1602-run 1 | 668E−12 | −88.45 | D-1607-run 1 | 549E−12 | −85.52 |
| D-1602-run 2 | 8.97E−10 | −91.07 | D-1607-run 2 | 7.47E−10 | −77.90 |
| D-1608 | 1.35E−9 | −75.97 | D-1614-run 1 | 803E−12 | −80.05 |
| D-1609-run 1 | 1.54E−9 | −81.34 | D-1614-run 2 | 6.78E−10 | −86.26 |
| D-1609-run 2 | 1.63E−09 | −77.49 | D-1615 | 2.12E−9 | −67.39 |
| D-1610-run 1 | 2.58E−9 | −84.25 | D-1616 | 38.3E−9 | −57.61 |
| D-1610-run 2 | 2.56E−09 | −80.89 | D-1617 | 4.8E−9 | −57.99 |
| D-1611-run 1 | 865E−12 | −89.50 | D-1618-run 1 | 1.18E−9 | −85.32 |
| D-1611-run 2 | 6.04E−10 | −86.80 | D-1618-run 2 | 2.42E−09 | −85.91 |
| D-1612 | 1.89E−9 | −77.95 | D-1619 | >100E−9 | 2.12 |
| D-1613-run 1 | 1.29E−9 | −84.46 | D-1620 | — | −47.40 |
| D-1613-run 2 | 1.44E−09 | −80.67 | D-1621 | >100E−9 | 1.40 |
| D-1622 | 1.37E−9 | −79.11 | D-1630-run 1 | 1.67E−9 | −83.08 |
| D-1623 | 3.43E−9 | −66.62 | D-1630-run 2 | 2.29E−09 | −83.88 |
| D-1624-run 1 | 6.9E−9 | −85.54 | D-1631-run 1 | 1.42E−9 | −87.66 |
| D-1624-run 2 | 3.15E−09 | −84.79 | D-1631-run 2 | 1.12E−09 | −86.08 |
| D-1625 | 2.07E−9 | −79.25 | D-1632-run 1 | 1.3E−9 | −88.34 |
| D-1626-run 1 | 2.14E−9 | −98.64 | D-1632-run 2 | 8.33E−10 | −85.76 |
| D-1626-run 2 | 2.02E−09 | −87.31 | D-1633-run 1 | 1.79E−9 | −90.59 |
| D-1627 | 6E−9 | −67.49 | D-1633-run 2 | 1.66E−09 | −82.90 |
| D-1628 | >100E−9 | 3.55 | D-1634-run 1 | 837E−12 | −82.47 |
| D-1629-run 1 | 1.13E−9 | −87.48 | D-1634-run 2 | 7.69E−10 | −84.53 |
| D-1629-run 2 | 1.43E−09 | −81.66 | D-1635-run 1 | 1.04E−9 | −88.75 |
| D-1636 | 964E−12 | −69.05 | D-1635-run 2 | 1.58E−09 | −93.88 |
| D-1637 | 2.36E−9 | −75.45 | D-1646 | 517E−12 | −80.04 |
| D-1638-run 1 | 583E−12 | −82.46 | D-1647 | 319E−12 | −73.09 |
| D-1638-run 2 | 7.20E−10 | −85.90 | D-1648-run 1 | 1.57E−9 | −81.70 |
| D-1639 | 411E−12 | −68.37 | D-1648-run 2 | 1.30E−09 | −84.65 |
| D-1640 | 788E−12 | −79.76 | D-1649 | 275E−12 | −79.59 |
| D-1641 | 1.85E−9 | −69.30 | D-1650 | 1.63E−9 | −80.12 |
| D-1642 | 2.52E−9 | −75.03 | D-1651-run 1 | 415E−12 | −83.10 |
| D-1643 | 3.97E−9 | −73.66 | D-1651-run 2 | 3.97E−10 | −90.33 |
| D-1644 | 886E−12 | −67.60 | D-1652-run 1 | 445E−12 | −81.69 |
| D-1645 | 822E−12 | −70.30 | D-1652-run 2 | 1.61E−10 | −86.02 |
| D-1653 | 197E−12 | −79.25 | D-1663-run 1 | 144E−12 | −87.88 |
| D-1654-run 1 | 279E−12 | −85.62 | D-1663-run 2 | 1.92E−10 | −91.58 |
| D-1654-run 2 | 3.82E−10 | −89.31 | D-1664-run 1 | 155E−12 | −81.73 |
| D-1655-run 1 | 380E−12 | −88.31 | D-1664-run 2 | 2.87E−10 | −89.13 |
| D-1655-run 2 | 3.35E−10 | −96.53 | D-1665-run 1 | 164E−12 | −81.33 |
| D-1656-run 1 | 200E−12 | −87.91 | D-1665-run 2 | 2.62E−10 | −87.08 |
| D-1656-run 2 | 1.86E−10 | −85.63 | D-1666-run 1 | 484E−12 | −84.08 |
| D-1657-run 1 | 144E−12 | −85.58 | D-1666-run 2 | 2.86E−10 | −82.03 |
| D-1657-run 2 | 3.53E−10 | −88.57 | D-1667-run 1 | 408E−12 | −85.17 |
| D-1658 | 197E−12 | −80.34 | D-1667-run 2 | 2.66E−10 | −87.72 |
| D-1659 | 255E−12 | −80.45 | D-1668-run 1 | 650E−12 | −83.77 |
| D-1660 | 597E−12 | −78.68 | D-1668-run 2 | 2.74E−10 | −86.81 |
| D-1661 | 219E−12 | −78.29 | | | |
| D-1662-run 1 | 369E−12 | −89.73 | | | |
| D-1662-run 2 | 2.84E−10 | −96.38 | | | |

[0224] Of the additional 406 mARC1 siRNA molecules targeting different regions of the human mARC1 transcript, 128 molecules produced a reduction of human mARC1 mRNA in Hep3B cells of 85% or greater. Forty-six molecules (duplex nos. D-1061; D-1093; D-1220; D-1276; D-1284; D-1298; D-1310; D-1311; D-1338; D-1363; D-1367; D-1375; D-1381; D-1382; D-1383; D-1386; D-1387; D-1388; D-1389; D-1390; D-1396; D-1400; D-1401; D-1402; D-1405; D-1407; D-1416; D-1420; D-1421; D-1441; D-1451; D-1487; D-1489; D-1491; D-1503; D-1504; D-1515; D-1549; D-1576; D-1581; D-1595; D-1596; D-1606; D-1626; D-1633; and D-1662) reduced human mARC1 mRNA by at least 90% with the majority of the molecules having IC50 values below 1 nM.

### Example 4. In Vivo Efficacy of siRNA Molecules in AAV Human mARC1 Mouse Model

[0225] To assess the efficacy of the mARC1 siRNA molecules in vivo, the sense strand in each siRNA molecule was conjugated to the trivalent GalNAc moiety shown in Formula VII by the methods described in Example 2 and the mARC1 siRNA molecules were administered to mice expressing the human MARC1 gene. 10-12-week-old C57BL/6 mice (The Jackson Laboratory) were fed standard chow (Harlan, 2020× Teklad global soy protein-free extruded rodent diet). Mice were intraperitoneally (i.p.) injected with an adeno-associated virus (AAV) encoding the human MARC1 gene (AAV-hmARC1) at a dose of 1×10¹¹ genome copies (GC) per animal. One week following AAV-hmARC1 injection, mice received a single subcutaneous (s.c.) injection of buffer or the mARC1 siRNA molecule at a dose of 0.5 mg/kg, 1 mg/kg, or 3 mg/kg body weight in buffer (n=3 each group). Animals were fasted and harvested four weeks following siRNA administration for further analysis. Liver total RNA from harvested animals was processed for qPCR analysis and serum parameters were measured by clinical analyzer (AU400 Chemistry Analyzer, Olympus). A percentage change in human mARC1 mRNA in liver for each animal was calculated relative to human mARC1 mRNA liver levels in control animals which expressed human mARC1 mRNA and received the buffer only injection (i.e. AAV-hmARC1 only animals).

[0226] The top performing mARC1 siRNA molecules from the in vitro activity assays described in Example 3 were evaluated for in vivo efficacy in this model. mARC1 siRNA molecules that exhibited significant in vivo knockdown activity were further evaluated in SAR studies to further improve in vivo potency and durability by altering chemical modification patterns. Results of 18 separate studies in the AAV-hmARC1 mouse model with different mARC1 siRNA molecules are shown in Tables 5-22 below. Data are expressed as average percent change from control at week 5 of study (4 weeks after siRNA injection) for each treatment group (n=3 animals/group). If a mARC1 siRNA molecule has the same trigger family designation as another mARC1 siRNA molecule, then the two molecules have the same core sequence (i.e. target the same region of the mARC1 transcript) but differ in chemical modification pattern.

TABLE 5
In vivo inhibition of human mARC1 mRNA in AAV-hmARC1 mice-Study 1

| | | | Avg. % | | | | Avg. % |
|---|---|---|---|---|---|---|---|
| | | | Change | | | | Change |
| | | | in | | | | in |
| Treatment | | Trigger | human | Treatment | | Trigger | human |
| (duplex | Dose | Family | mARC1 | (duplex | Dose | Family | mARC1 |
| no.) | (mg/kg) | Designation | mRNA | no.) | (mg/kg) | Designation | mRNA |
| D-2000 | 1 | T918 | −58 | D-2032 | 1 | T1110 | 6.8 |
| D-2001 | 1 | T1114 | −71.6 | D-2033 | 1 | T1111 | 8.4 |
| D-2002 | 1 | T1016 | −50.6 | D-2034 | 1 | T911 | −14.1 |
| D-2003 | 1 | T1023 | −51.5 | D-2035 | 1 | T1079 | −25 |
| D-2004 | 1 | T704 | −67.4 | D-2036 | 1 | T913 | −23.6 |
| D-2005 | 1 | T1076 | −43.3 | D-2038 | 1 | T914 | −67.2 |
| D-2008 | 1 | T1476 | −45.3 | D-2040 | 1 | T1484 | −54.7 |
| D-2011 | 1 | T1487 | −54.2 | D-2042 | 1 | T1372 | −76.6 |
| D-2013 | 1 | T1364 | −17.3 | D-2044 | 1 | T1449 | −62.6 |
| D-2022 | 1 | T2131 | −67.6 | D-2045 | 1 | T2077 | −69.2 |
| D-2024 | 1 | T816 | −72.8 | D-2046 | 1 | T1363 | −39.7 |
| D-2026 | 1 | T1108 | −10.5 | D-2047 | 1 | T1367 | −58.4 |
| D-2028 | 1 | T1113 | −4.8 | D-2049 | 1 | T1104 | −26 |
| D-2031 | 1 | T1109 | −27.8 | D-2050 | 1 | T1101 | −42.4 |

TABLE 6
In vivo inhibition of human mARC1 mRNA in AAV-hmARC1 mice-Study 2

| | | | Avg. % | | | | Avg. % |
|---|---|---|---|---|---|---|---|
| | | | Change | | | | Change |
| | | | in | | | | in |
| Treatment | | Trigger | human | Treatment | | Trigger | human |
| (duplex | Dose | Family | mARC1 | (duplex | Dose | Family | mARC1 |
| no.) | (mg/kg) | Designation | mRNA | no.) | (mg/kg) | Designation | mRNA |
| D-2006 | 1 | T1080 | −60.12 | D-2048 | 1 | T1780 | −48.24 |
| D-2015 | 1 | T2024 | −59.3 | D-2051 | 1 | T1670 | −61.04 |
| D-2016 | 1 | T2032 | −63.1 | D-2052 | 1 | T1370 | −89.53 |
| D-2017 | 1 | T2034 | −70.1 | D-2053 | 1 | T1458 | −81.49 |
| D-2019 | 1 | T2099 | −43.07 | D-2054 | 1 | T1878 | −36.34 |
| D-2025 | 1 | T1086 | −53.07 | D-2055 | 1 | T1767 | −66.47 |
| D-2027 | 1 | T1105 | −22.88 | D-2057 | 1 | T788 | −69.06 |
| D-2029 | 1 | T976 | −42.62 | D-2058 | 1 | T1275 | −84.33 |
| D-2030 | 1 | T1123 | −28.6 | D-2059 | 1 | T1814 | −78.71 |
| D-2037 | 1 | T898 | −18.98 | D-2060 | 1 | T1130 | −74.14 |
| D-2039 | 1 | T813 | −69.93 | D-2061 | 1 | T1816 | −75.23 |
| D-2041 | 1 | T1127 | −21.84 | D-2062 | 1 | T1485 | −58.27 |
| D-2043 | 1 | T1375 | −72.11 | | | | |

TABLE 7
In vivo inhibition of human mARC1 mRNA in AAV-hmARC1 mice-Study 3

| | | | Avg. % | | | | Avg. % |
|---|---|---|---|---|---|---|---|
| | | | Change | | | | Change |
| | | | in | | | | in |
| Treatment | | Trigger | human | Treatment | | Trigger | human |
| (duplex | Dose | Family | mARC1 | (duplex | Dose | Family | mARC1 |
| no.) | (mg/kg) | Designation | mRNA | no.) | (mg/kg) | Designation | mRNA |
| D-2063 | 1 | T1229 | −69.57 | D-2075 | 1 | T1382 | −52.85 |
| D-2064 | 1 | T885 | −26.21 | D-2076 | 1 | T1236 | −86.21 |
| D-2065 | 1 | T2068 | −73.42 | D-2077 | 1 | T1235 | −87.22 |
| D-2066 | 1 | T1227 | −54.74 | D-2078 | 1 | T1234 | −91.7 |
| D-2067 | 1 | T1268 | −27.15 | D-2079 | 1 | T2074 | −85.91 |
| D-2068 | 1 | T1992 | −56.89 | D-2080 | 1 | T1233 | −88.99 |
| D-2069 | 1 | T1990 | −17.92 | D-2081 | 1 | T1232 | −89.64 |
| D-2070 | 1 | T1959 | −72.22 | D-2082 | 1 | T2072 | −74.89 |
| D-2071 | 1 | T1146 | −55.69 | D-2083 | 1 | T1005 | −78.85 |
| D-2072 | 1 | T1526 | −81.87 | D-2084 | 1 | T948 | −45.28 |
| D-2073 | 1 | T1717 | −57.1 | D-2085 | 1 | T573 | −34.79 |
| D-2074 | 1 | T1077 | −25.26 | D-2101 | 1 | T836 | −57 |

TABLE 8
In vivo inhibition of human mARC1 mRNA in AAV-hmARC1 mice-Study 4

| | | | Avg. % | | | | Avg. % |
|---|---|---|---|---|---|---|---|
| | | | Change | | | | Change |
| | | | in | | | | in |
| Treatment | | Trigger | human | Treatment | | Trigger | human |
| (duplex | Dose | Family | mARC1 | (duplex | Dose | Family | mARC1 |
| no.) | (mg/kg) | Designation | mRNA | no.) | (mg/kg) | Designation | mRNA |
| D-2042 | 1 | T1372 | −72.75 | D-2097 | 1 | T999 | −11.78 |
| D-2086 | 1 | T590 | −18.09 | D-2098 | 1 | T609 | −44.23 |
| D-2087 | 1 | T1527 | −51.27 | D-2099 | 1 | T781 | −60.5 |
| D-2088 | 1 | T1067 | −23.35 | D-2100 | 1 | T830 | −41.23 |
| D-2089 | 1 | T1696 | −40.51 | D-2102 | 1 | T954 | −61.93 |
| D-2090 | 1 | T1548 | −51.00 | D-2103 | 1 | T1833 | −35.41 |
| D-2091 | 1 | T235 | −20.06 | D-2104 | 1 | T2020 | −36.31 |
| D-2092 | 1 | T508 | −5.28 | D-2105 | 1 | T2059 | −70.02 |
| D-2093 | 1 | T239 | −11.41 | D-2106 | 1 | T2060 | −64.34 |
| D-2094 | 1 | T1736 | −50.26 | D-2107 | 1 | T1467 | −37.67 |
| D-2095 | 1 | T240 | 13.33 | D-2108 | 1 | T1247 | −79.83 |
| D-2096 | 1 | T998 | −7.13 | D-2109 | 1 | T2133 | −31.79 |

TABLE 9
In vivo inhibition of human mARC1 mRNA in AAV-hmARC1 mice-Study 5

| | | | Avg. % | | | | Avg. % |
|---|---|---|---|---|---|---|---|
| | | | Change | | | | Change |
| | | | in | | | | in |
| Treatment | | Trigger | human | Treatment | | Trigger | human |
| (duplex | Dose | Family | mARC1 | (duplex | Dose | Family | mARC1 |
| no.) | (mg/kg) | Designation | mRNA | no.) | (mg/kg) | Designation | mRNA |
| D-2042 | 1 | T1372 | −75.98 | D-2110 | 1 | T596 | −67.89 |
| D-2052 | 3 | T1370 | −91.31 | D-2111 | 1 | T1334 | −88.01 |
| D-2052 | 1 | T1370 | −79.79 | D-2112 | 1 | T840 | −57.49 |
| D-2052 | 0.5 | T1370 | −51.84 | D-2113 | 1 | T1239 | −76.41 |
| D-2053 | 3 | T1458 | −91.83 | D-2114 | 1 | T2016 | −59.91 |
| D-2053 | 1 | T1458 | −85.54 | D-2115 | 1 | T2017 | −80.5 |
| D-2053 | 0.5 | T1458 | −30.4 | D-2116 | 1 | T1475 | −71.84 |
| D-2058 | 3 | T1275 | −85.79 | D-2117 | 1 | T2018 | −59.18 |
| D-2058 | 1 | T1275 | −74.59 | D-2118 | 1 | T2106 | −82.04 |
| D-2058 | 0.5 | T1275 | −52.58 | D-2119 | 1 | T1273 | −70.63 |
| D-2059 | 1 | T1814 | −71.24 | D-2120 | 1 | T1506 | −53.72 |
| D-2061 | 1 | T1816 | −67.34 | D-2121 | 1 | T1537 | −67.99 |

TABLE 10
In vivo inhibition of human mARC1 mRNA in AAV-hmARC1 mice-Study 6

| | | | Avg. % | | | | Avg. % |
|---|---|---|---|---|---|---|---|
| | | | Change | | | | Change |
| | | | in | | | | in |
| Treatment | | Trigger | human | Treatment | | Trigger | human |
| (duplex | Dose | Family | mARC1 | (duplex | Dose | Family | mARC1 |
| no.) | (mg/kg) | Designation | mRNA | no.) | (mg/kg) | Designation | mRNA |
| D-2042 | 1 | T1372 | −70.56 | D-2137 | 1 | T2073 | −28.29 |
| D-2078 | 3 | T1234 | −95.31 | D-2138 | 1 | T1089 | −42.53 |
| D-2078 | 1 | T1234 | −81.28 | D-2139 | 1 | T1716 | −60.34 |
| D-2078 | 0.5 | T1234 | −78.05 | D-2140 | 1 | T1124 | −46.49 |
| D-2079 | 3 | T2074 | −87.42 | D-2141 | 1 | T1965 | −51.64 |
| D-2079 | 1 | T2074 | −71.78 | D-2142 | 1 | T1230 | −73.09 |
| D-2079 | 0.5 | T2074 | −68.17 | D-2143 | 1 | T2071 | −47.83 |
| D-2080 | 1 | T1233 | −87.66 | D-2144 | 1 | T1012 | −17.18 |
| D-2081 | 3 | T1232 | −96.49 | D-2145 | 1 | T2102 | −73.86 |
| D-2081 | 1 | T1232 | −85.71 | D-2158 | 1 | T1372 | −80.83 |
| D-2081 | 0.5 | T1232 | −70.37 | D-2169 | 1 | T1372 | −71.01 |
| D-2083 | 1 | T1005 | −64.01 | D-2182 | 1 | T1372 | −80.03 |
| D-2134 | 1 | T604 | 15.84 | D-2185 | 1 | T1372 | −76.36 |
| D-2135 | 1 | T607 | −47.29 | D-2189 | 1 | T1372 | −82.41 |
| D-2136 | 1 | T1405 | −76.24 | | | | |

TABLE 11
In vivo inhibition of human mARC1 mRNA in
AAV-hmARC1 mice - Study 7

| | | | Avg. % |
|---|---|---|---|
| | | | Change |
| | | | in |
| Treatment | | Trigger | human |
| (duplex | Dose | Family | mARC1 |
| no.) | (mg/kg) | Designation | mRNA |
| D-2042 | 1 | T1372 | −70.27 |
| D-2161 | 1 | T914 | −29.66 |
| D-2162 | 1 | T1372 | −53.65 |
| D-2163 | 1 | T1114 | −60.02 |
| D-2166 | 1 | T2077 | −9.73 |
| D-2167 | 1 | T816 | −9.79 |
| D-2183 | 1 | T1372 | −64.17 |
| D-2184 | 1 | T1372 | −68.3 |
| D-2186 | 1 | T1372 | −73.66 |
| D-2187 | 1 | T1372 | −65.74 |
| D-2201 | 1 | T1458 | −46.02 |
| D-2206 | 1 | T1814 | −32.35 |
| D-2207 | 1 | T1130 | −24.97 |
| D-2208 | 1 | T1816 | 24.09 |
| D-2209 | 1 | T1458 | −71.78 |
| D-2210 | 1 | T1275 | −40.33 |
| D-2211 | 1 | T1370 | −80.39 |
| D-2212 | 1 | T2034 | −66.09 |
| D-2213 | 1 | T1375 | −72.26 |
| D-2214 | 1 | T1814 | −66.69 |
| D-2215 | 1 | T1130 | −24.86 |
| D-2216 | 1 | T1816 | −44.88 |
| D-2217 | 1 | T1458 | −53.44 |
| D-2218 | 1 | T1275 | −67.9 |
| D-2222 | 1 | T1814 | −61.29 |
| D-2223 | 1 | T1130 | −71.27 |
| D-2224 | 1 | T1816 | −41.34 |
| D-2225 | 1 | T1458 | −82.05 |
| D-2226 | 1 | T1275 | −66.42 |

TABLE 12
In vivo inhibition of human mARC1 mRNA in AAV-
hmARC1 mice - Study 8

| | | | Avg. % |
|---|---|---|---|
| | | | Change |
| | | | in |
| Treatment | | Trigger | human |
| (duplex | Dose | Family | mARC1 |
| no.) | (mg/kg) | Designation | mRNA |
| D-2081 | 1 | T1232 | −89 |
| D-2081 | 1 | T1232 | −84.81 |
| D-2081 | 0.5 | T1232 | −81.83 |
| D-2239 | 0.5 | T1005 | −43.57 |
| D-2240 | 0.5 | T1232 | −70.09 |
| D-2241 | 0.5 | T1233 | −91.21 |
| D-2242 | 0.5 | T2074 | −72.33 |
| D-2243 | 0.5 | T1234 | −82.12 |
| D-2244 | 0.5 | T1005 | −61.6 |
| D-2245 | 0.5 | T1232 | −70.32 |
| D-2246 | 0.5 | T1233 | −82.34 |
| D-2247 | 0.5 | T2074 | −71.57 |
| D-2248 | 0.5 | T1234 | −78.58 |
| D-2249 | 0.5 | T1005 | −33.8 |
| D-2250 | 0.5 | T1232 | −68.42 |
| D-2251 | 0.5 | T1233 | −61.68 |
| D-2252 | 0.5 | T2074 | −73.55 |
| D-2253 | 0.5 | T1234 | −75.93 |
| D-2254 | 0.5 | T1005 | −72.84 |
| D-2255 | 0.5 | T1232 | −85.73 |
| D-2256 | 0.5 | T1233 | −73.31 |
| D-2257 | 0.5 | T2074 | −57.42 |
| D-2258 | 0.5 | T1234 | −86.98 |
| D-2259 | 0.5 | T1234 | −76.42 |
| D-2260 | 0.5 | T2074 | −72.66 |
| D-2261 | 0.5 | T1232 | −78.9 |
| D-2262 | 0.5 | T2072 | −43.95 |

TABLE 13
In vivo inhibition of human mARC1 mRNA
in AAV-hmARC1 mice - Study 9

| | | | Avg. % |
|---|---|---|---|
| | | | Change |
| | | | in |
| Treatment | | Trigger | human |
| (duplex | Dose | Family | mARC1 |
| no.) | (mg/kg) | Designation | mRNA |
| D-2042 | 1 | T1372 | −70.46 |
| D-2081 | 0.5 | T1232 | −73.32 |
| D-2168 | 1 | T914 | −25.57 |
| D-2170 | 1 | T1114 | −59.16* |
| D-2173 | 1 | T2077 | −29.63 |
| D-2190 | 1 | T1114 | −1.89 |
| D-2193 | 1 | T2077 | −52.59* |
| D-2204 | 1 | T2034 | −37.36 |
| D-2220 | 1 | T2034 | −65.89 |
| D-2227 | 1 | T1113 | −39.03 |
| D-2229 | 1 | T1110 | −67.96 |
| D-2232 | 1 | T913 | −63.89 |
| D-2233 | 1 | T2034 | −62.85 |
| D-2236 | 1 | T1130 | −61.02 |
| D-2264 | 0.5 | T1233 | −63.96 |
| D-2265 | 0.5 | T1234 | −70 |
| D-2266 | 0.5 | T2074 | −47.47 |
| D-2268 | 0.5 | T1233 | −63.89 |
| D-2269 | 0.5 | T1233 | −58.41 |
| D-2270 | 0.5 | T1234 | −53.36 |
| D-2271 | 0.5 | T1234 | −57.52 |
| D-2272 | 0.5 | T2074 | −65.81 |
| D-2273 | 0.5 | T2074 | −62.06 |
| D-2301 | 1 | T1231 | −81.85 |
| D-2302 | 1 | T2070 | −72.03 |
| D-2303 | 1 | T2078 | −54.08 |
| D-2304 | 1 | T1365 | −67.08 |
| D-2305 | 1 | T1366 | −71.92 |
| D-2306 | 1 | T1369 | −64.17 |

*averages include one outlier; if outlier removed, average % change would be −79.41% (D-2170) and −70.68% (D-2193).

TABLE 14
In vivo inhibition of human mARC1 mRNA in
AAV-hmARC1 mice - Study 10

| | | | Avg. % |
|---|---|---|---|
| | | | Change |
| | | | in |
| Treatment | | Trigger | human |
| (duplex | Dose | Family | mARC1 |
| no.) | (mg/kg) | Designation | mRNA |
| D-2042 | 1 | T1372 | −74.85 |
| D-2081 | 0.5 | T1232 | −79.33 |
| D-2307 | 1 | T1373 | −57.28 |
| D-2308 | 1 | T1374 | −54.28 |
| D-2309 | 0.5 | T1234 | −68.23 |
| D-2310 | 0.5 | T2074 | −49.9 |
| D-2311 | 0.5 | T1233 | −71.87 |
| D-2312 | 0.5 | T1232 | −56.57 |
| D-2313 | 0.5 | T2072 | −46.01 |
| D-2314 | 0.5 | T1234 | −72.33 |
| D-2315 | 0.5 | T2074 | −61.11 |
| D-2316 | 0.5 | T1233 | −80.59 |
| D-2317 | 0.5 | T1232 | −79.12 |
| D-2318 | 0.5 | T2072 | −60.72 |
| D-2344 | 0.5 | T1234 | −79.85 |
| D-2345 | 0.5 | T2074 | −66.64 |
| D-2346 | 0.5 | T1233 | −71.49 |
| D-2347 | 0.5 | T1232 | −67.88 |
| D-2348 | 0.5 | T2072 | −29.7 |
| D-2349 | 0.5 | T1234 | −63.39 |
| D-2350 | 0.5 | T2074 | −53.12 |
| D-2351 | 0.5 | T1233 | −67.77 |
| D-2352 | 0.5 | T1232 | −36.82 |
| D-2353 | 0.5 | T2072 | −37.66 |
| D-2393 | 0.5 | T1234 | −47.75 |
| D-2394 | 0.5 | T2074 | −65.84 |
| D-2395 | 0.5 | T1233 | −70.01 |
| D-2396 | 0.5 | T1232 | −54.78 |
| D-2397 | 0.5 | T2072 | −28.06 |

TABLE 15
In vivo inhibition of human mARC1 mRNA in
AAV-hmARC1 mice - Study 11

| | | | Avg. % |
|---|---|---|---|
| | | | Change |
| | | | in |
| Treatment | | Trigger | human |
| (duplex | Dose | Family | mARC1 |
| no.) | (mg/kg) | Designation | mRNA |
| D-2081 | 0.5 | T1232 | −79.43 |
| D-2319 | 0.5 | T1234 | −63.31 |
| D-2320 | 0.5 | T2074 | −61.86 |
| D-2321 | 0.5 | T1233 | −75.48 |
| D-2322 | 0.5 | T1232 | −59.65 |
| D-2323 | 0.5 | T2072 | −34.97 |
| D-2324 | 0.5 | T1234 | −72.96 |
| D-2325 | 0.5 | T2074 | −66.78 |
| D-2326 | 0.5 | T1233 | −66.35 |
| D-2327 | 0.5 | T1232 | −55.48 |
| D-2328 | 0.5 | T2072 | −32.95 |
| D-2329 | 0.5 | T1234 | −79.94 |
| D-2330 | 0.5 | T2074 | −35.52 |
| D-2331 | 0.5 | T1233 | −55.59 |
| D-2332 | 0.5 | T1232 | −77.85 |
| D-2333 | 0.5 | T2072 | −28.56 |
| D-2334 | 0.5 | T1234 | −69.42 |
| D-2335 | 0.5 | T2074 | −40.1 |
| D-2336 | 0.5 | T1233 | −59.06 |
| D-2337 | 0.5 | T1232 | −53.38 |
| D-2338 | 0.5 | T2072 | −56.97 |
| D-2339 | 0.5 | T1234 | −72.93 |
| D-2340 | 0.5 | T2074 | −46.96 |
| D-2341 | 0.5 | T1233 | −83.39 |
| D-2342 | 0.5 | T1232 | −64.03 |
| D-2354 | 0.5 | T1234 | −66.85 |
| D-2355 | 0.5 | T2074 | −49.63 |
| D-2356 | 0.5 | T1233 | −80.84 |
| D-2357 | 0.5 | T1232 | −76.56 |

TABLE 16
In vivo inhibition of human mARC1 mRNA
in AAV-hmARC1 mice - Study 12

| | | | Avg. % |
|---|---|---|---|
| | | | Change |
| | | | in |
| Treatment | | Trigger | human |
| (duplex | Dose | Family | mARC1 |
| no.) | (mg/kg) | Designation | mRNA |
| D-2042 | 1 | T1372 | −78.96 |
| D-2080 | 0.5 | T1233 | −76.6 |
| D-2081 | 0.5 | T1232 | −80.5 |
| D-2241 | 0.5 | T1233 | −79.44 |
| D-2258 | 0.5 | T1234 | −79.5 |
| D-2374 | 1 | T1334 | −76.39 |
| D-2375 | 1 | T1334 | −84.32 |
| D-2376 | 1 | T1239 | −77.92 |
| D-2377 | 1 | T2017 | −68.11 |
| D-2378 | 1 | T2106 | −73.92 |
| D-2379 | 1 | T1334 | −81.46 |
| D-2380 | 1 | T1239 | −60.94 |
| D-2381 | 1 | T2017 | −73.06 |
| D-2382 | 1 | T2106 | −72.66 |
| D-2384 | 1 | T1372 | −87.07 |
| D-2385 | 1 | T1372 | −86.66 |
| D-2386 | 1 | T1372 | −82.75 |
| D-2387 | 1 | T1372 | −85.64 |
| D-2388 | 1 | T1372 | −85.26 |
| D-2389 | 1 | T1372 | −82.12 |
| D-2390 | 1 | T1372 | −78.41 |
| D-2391 | 1 | T1372 | −88.62 |
| D-2392 | 1 | T1372 | −79.8 |
| D-2399 | 1 | T1372 | −90.61 |
| D-2400 | 1 | T1372 | −82.94 |
| D-2401 | 1 | T1372 | −92.12 |
| D-2402 | 1 | T1372 | −73.56 |
| D-2403 | 1 | T1372 | −89.72 |

TABLE 17
In vivo inhibition of human mARC1 mRNA in
AAV-hmARC1 mice - Study 13

| | | | Avg. % |
|---|---|---|---|
| | | | Change |
| | | | in |
| Treatment | | Trigger | human |
| (duplex | Dose | Family | mARC1 |
| no.) | (mg/kg) | Designation | mRNA |
| D-2042 | 1 | T1372 | −72.06 |
| D-2045 | 1 | T2077 | −70.1 |
| D-2053 | 0.5 | T1458 | −43.98 |
| D-2079 | 0.5 | T2074 | −74.22 |
| D-2079 | 0.5 | T2074 | −67.06 |
| D-2081 | 0.5 | T1232 | −75.85 |
| D-2158 | 0.5 | T1372 | −77.49 |
| D-2159 | 1 | T1114 | −73.23 |
| D-2170 | 1 | T1114 | −69.02 |
| D-2182 | 0.5 | T1372 | −80.47 |
| D-2188 | 1 | T914 | −78.98 |
| D-2189 | 0.5 | T1372 | −76.83 |
| D-2193 | 1 | T2077 | −69.63 |
| D-2196 | 1 | T2034 | −87.29 |
| D-2200 | 1 | T1816 | −69.25 |
| D-2225 | 0.5 | T1458 | −65.93 |
| D-2228 | 1 | T1016 | −81.59 |
| D-2230 | 1 | T1111 | −28.82 |
| D-2231 | 1 | T911 | −41.89 |
| D-2237 | 1 | T1816 | −50.64 |
| D-2238 | 1 | T1458 | −80.45 |
| D-2242 | 0.5 | T2074 | −69.91 |
| D-2247 | 0.5 | T2074 | −59.81 |
| D-2252 | 0.5 | T2074 | −63.16 |
| D-2254 | 0.5 | T1005 | −34.25 |
| D-2260 | 0.5 | T2074 | −71.08 |
| D-2267 | 1 | T1816 | −21.42 |
| D-2343 | 0.5 | T2072 | −37.41 |
| D-2358 | 0.5 | T2072 | −36.05 |

TABLE 18
In vivo inhibition of human mARC1 mRNA
in AAV-hmARC1 mice - Study 14

| | | | Avg. % |
|---|---|---|---|
| | | | Change |
| | | | in |
| Treatment | | Trigger | human |
| (duplex | Dose | Family | mARC1 |
| no.) | (mg/kg) | Designation | mRNA |
| D-2081 | 0.5 | T1232 | −76.37 |
| D-2108 | 0.5 | T1247 | −75.82 |
| D-2111 | 0.5 | T1334 | −78.2 |
| D-2113 | 0.5 | T1239 | −69.06 |
| D-2115 | 0.5 | T2017 | −69.6 |
| D-2118 | 0.5 | T2106 | −66.06 |
| D-2430 | 0.5 | T1334 | −72.94 |
| D-2431 | 0.5 | T1239 | −66.56 |
| D-2432 | 0.5 | T2017 | −76.11 |
| D-2433 | 0.5 | T2106 | −67.19 |
| D-2434 | 0.5 | T1405 | −24.95 |
| D-2435 | 0.5 | T1526 | −68.17 |
| D-2436 | 0.5 | T1247 | −69.01 |
| D-2437 | 0.5 | T1231 | −75.43 |
| D-2438 | 0.5 | T1405 | −35.85 |
| D-2439 | 0.5 | T1526 | −64.23 |
| D-2440 | 0.5 | T1247 | −78.51 |
| D-2441 | 0.5 | T1231 | −72.52 |
| D-2442 | 0.5 | T1405 | −9.8 |
| D-2443 | 0.5 | T1526 | −48.33 |
| D-2444 | 0.5 | T1247 | −62.49 |
| D-2445 | 0.5 | T1231 | −56.81 |
| D-2446 | 0.5 | T1334 | −68.94 |
| D-2447 | 0.5 | T1239 | −56.33 |
| D-2448 | 0.5 | T2017 | −67.27 |
| D-2449 | 0.5 | T2106 | −75.69 |
| D-2450 | 0.5 | T1405 | −45.34 |
| D-2451 | 0.5 | T1526 | −64.83 |
| D-2453 | 0.5 | T1231 | −65.09 |

TABLE 19
In vivo inhibition of human mARC1 mRNA in
AAV-hmARC1 mice - Study 15

| | | | Avg. % |
|---|---|---|---|
| | | | Change |
| | | | in |
| Treatment | | Trigger | human |
| (duplex | Dose | Family | mARC1 |
| no.) | (mg/kg) | Designation | mRNA |
| D-2081 | 0.5 | T1232 | −78.97 |
| D-2199 | 0.5 | T1130 | −59.09 |
| D-2454 | 0.5 | T2074 | −65.23 |
| D-2455 | 0.5 | T2074 | −67.42 |
| D-2456 | 0.5 | T2074 | −61.94 |
| D-2457 | 0.5 | T2074 | −65.7 |
| D-2458 | 0.5 | T2074 | −46.41 |
| D-2459 | 0.5 | T2074 | −50.02 |
| D-2460 | 0.5 | T2074 | −60.38 |
| D-2461 | 0.5 | T2034 | −58.32 |
| D-2462 | 0.5 | T1114 | −77.64 |
| D-2463 | 0.5 | T2077 | −70.9 |
| D-2464 | 0.5 | T1130 | −58.04 |
| D-2465 | 0.5 | T2072 | −65.15 |
| D-2466 | 0.5 | T1959 | −55.27 |
| D-2467 | 0.5 | T1334 | −75.26 |
| D-2468 | 0.5 | T2072 | −60.05 |
| D-2469 | 0.5 | T1959 | −44.15 |
| D-2470 | 0.5 | T2072 | −51.87 |
| D-2471 | 0.5 | T1959 | −34.89 |
| D-2472 | 0.5 | T2077 | −43.85 |
| D-2473 | 0.5 | T2072 | −60.33 |
| D-2474 | 0.5 | T1959 | −38.56 |
| D-2475 | 0.5 | T1130 | −38.23 |
| D-2476 | 0.5 | T1334 | −65.84 |
| D-2477 | 0.5 | T2072 | −45.84 |
| D-2478 | 0.5 | T1959 | −50.33 |
| D-2479 | 0.5 | T1114 | −62.99 |
| D-2480 | 0.5 | T1526 | −79.32 |

TABLE 20
In vivo inhibition of human mARC1 mRNA
in AAV-hmARC1 mice - Study 16

| | | | Avg. % |
|---|---|---|---|
| | | | Change |
| | | | in |
| Treatment | | Trigger | human |
| (duplex | Dose | Family | mARC1 |
| no.) | (mg/kg) | Designation | mRNA |
| D-2078 | 0.5 | T1234 | −80.46 |
| D-2080 | 0.5 | T1233 | −78.74 |
| D-2081 | 0.5 | T1232 | −71.47 |
| D-2082 | 0.5 | T2072 | −63.84 |
| D-2105 | 0.5 | T2059 | −62.69 |
| D-2136 | 0.5 | T1405 | −32.32 |
| D-2241 | 3 | T1233 | −96.62 |
| D-2241 | 1 | T1233 | −92.47 |
| D-2241 | 0.5 | T1233 | −84.8 |
| D-2243 | 3 | T1234 | −97.39 |
| D-2243 | 1 | T1234 | −94.88 |
| D-2243 | 0.5 | T1234 | −83.38 |
| D-2246 | 3 | T1233 | −95.55 |
| D-2246 | 1 | T1233 | −92.55 |
| D-2246 | 0.5 | T1233 | −81.55 |
| D-2255 | 3 | T1232 | −95.38 |
| D-2255 | 1 | T1232 | −84.2 |
| D-2255 | 0.5 | T1232 | −76.6 |
| D-2258 | 3 | T1234 | −96.65 |
| D-2258 | 1 | T1234 | −89.16 |
| D-2258 | 0.5 | T1234 | −79.98 |
| D-2301 | 0.5 | T1231 | −87.12 |
| D-2316 | 0.5 | T1233 | −76.86 |
| D-2317 | 0.5 | T1232 | −66.58 |
| D-2318 | 0.5 | T2072 | −54.2 |
| D-2341 | 0.5 | T1233 | −90.21 |
| D-2344 | 0.5 | T1234 | −72.37 |
| D-2481 | 0.5 | T1526 | −78.98 |
| D-2072 | 0.5 | T1526 | −71.36 |

TABLE 21
In vivo inhibition of human mARC1 mRNA
in AAV-hmARC1 mice - Study 17

| | | | Avg. % |
|---|---|---|---|
| | | | Change |
| | | | in |
| Treatment | | Trigger | human |
| (duplex | Dose | Family | mARC1 |
| no.) | (mg/kg) | Designation | mRNA |
| D-2057 | 0.5 | T788 | −36.45 |
| D-2060 | 0.5 | T1130 | −49.77 |
| D-2081 | 0.5 | T1232 | −78.72 |
| D-2188 | 0.5 | T914 | −41.93 |
| D-2196 | 3 | T2034 | −94.08 |
| D-2196 | 1 | T2034 | −78.27 |
| D-2196 | 0.5 | T2034 | −67.92 |
| D-2225 | 3 | T1458 | −91.32 |
| D-2225 | 1 | T1458 | −79.05 |
| D-2225 | 0.5 | T1458 | −57.61 |
| D-2238 | 0.5 | T1458 | −74.65 |
| D-2260 | 3 | T2074 | −91.09 |
| D-2260 | 1 | T2074 | −74.13 |
| D-2260 | 0.5 | T2074 | −56.43 |
| D-2384 | 0.5 | T1372 | −76.06 |
| D-2391 | 0.5 | T1372 | −69.13 |
| D-2399 | 0.5 | T1372 | −75.08 |
| D-2399 | 1 | T1372 | −78.92 |
| D-2399 | 3 | T1372 | −95.3 |
| D-2401 | 0.5 | T1372 | −56.74 |
| D-2401 | 1 | T1372 | −84.24 |
| D-2401 | 3 | T1372 | −91.75 |
| D-2403 | 0.5 | T1372 | −58.73 |
| D-2462 | 3 | T1114 | −86.71 |
| D-2462 | 1 | T1114 | −55.52 |
| D-2462 | 0.5 | T1114 | −35.15 |
| D-2465 | 3 | T2072 | −91.63 |
| D-2465 | 1 | T2072 | −67.47 |
| D-2465 | 0.5 | T2072 | −62.5 |

TABLE 22
In vivo inhibition of human mARC1 mRNA
in AAV-hmARC1 mice - Study 18

| | | | Avg. % |
|---|---|---|---|
| | | | Change |
| | | | in |
| Treatment | | Trigger | human |
| (duplex | Dose | Family | mARC1 |
| no.) | (mg/kg) | Designation | mRNA |
| D-2081 | 0.5 | T1232 | −80.49 |
| D-2483 | 0.5 | T788 | −19.16 |
| D-2484 | 0.5 | T1475 | −48.32 |
| D-2485 | 0.5 | T1273 | −34.62 |
| D-2486 | 0.5 | T2102 | −50.34 |
| D-2487 | 0.5 | T2070 | −44.11 |
| D-2488 | 0.5 | T1366 | −55.46 |
| D-2489 | 0.5 | T788 | −15.04 |
| D-2490 | 0.5 | T1475 | −71.42 |
| D-2491 | 0.5 | T1273 | −47.55 |
| D-2492 | 0.5 | T2102 | −59.06 |
| D-2493 | 0.5 | T2070 | −51.01 |
| D-2494 | 0.5 | T1366 | −65.43 |
| D-2495 | 0.5 | T788 | −46.33 |
| D-2496 | 0.5 | T1475 | −35.85 |
| D-2497 | 0.5 | T1273 | −59.29 |
| D-2498 | 0.5 | T2102 | −21.14 |
| D-2499 | 0.5 | T2070 | −15.52 |
| D-2500 | 0.5 | T1366 | −35.23 |
| D-2501 | 0.5 | T788 | −23.95 |
| D-2502 | 0.5 | T1475 | −53.81 |
| D-2503 | 0.5 | T1273 | −52.52 |
| D-2504 | 0.5 | T2102 | −66.42 |
| D-2505 | 0.5 | T2070 | −37.75 |
| D-2506 | 0.5 | T1366 | −62.14 |
| D-2507 | 0.5 | T788 | −45.32 |
| D-2509 | 0.5 | T1273 | −15.16 |
| D-2510 | 0.5 | T2102 | −80.41 |
| D-2511 | 0.5 | T2070 | −65.62 |
| D-2512 | 0.5 | T1366 | −68.19 |

[0227] Two mARC1 siRNA molecules, which exhibited significant silencing activity in early in vivo studies (duplex nos. D-2042 and D-2081), were used as benchmark compounds in later in vivo studies. Seventy mARC1 siRNA molecules produced a 75% or greater reduction of human mARC1 mRNA in the AAV-hmARC1 mice at four weeks following a single s.c. injection at a dose of 1 mg/kg. Some of the tested mARC1 siRNA molecules, including D-2081, D-2241, D-2255, and D-2258, were particularly potent as evidenced by an 85% or greater reduction of human mARC1 mRNA at four weeks with just a single s.c. injection of 0.5 mg/kg. In addition, mARC1 siRNA molecules targeting certain regions of the human mARC1 transcript were observed to produce greater reductions of human mARC1 mRNA in vivo as compared to mARC1 siRNA molecules targeting other regions of the transcript. For example, mARC1 siRNA molecules with antisense strands having a sequence complementary to a region of the human mARC1 transcript (SEQ ID NO: 1) between nucleotides 1205 to 1250, nucleotides 1345 to 1375, or nucleotides 2039 to 2078 exhibited significant knockdown activity four weeks after a single s.c. injection at 1 mg/kg (Table 23). Table 23 summarizes the average percent change in human mARC1 mRNA liver levels from the studies described above for siRNA molecules having the same chemical modification pattern and targeting the human transcript at the indicated nucleotide range. mARC1 siRNA molecules targeting the human transcript between nucleotides 1211 to 1236 were especially efficacious as administration of a single s.c. dose of 1 mg/kg of such siRNA molecules reduced human mARC1 mRNA levels by greater than 80% for at least four weeks following dosing.

TABLE 23
Summary of in vivo efficacy for mARC1 siRNA molecules targeting specific
transcript regions

| | | | | |
|---|---|---|---|---|
| | | | | Avg. % |
| | Target site | | | change in |
| | within | | | human |
| | human MARC1 | | | mARC1 |
| | transcript | | | mRNA at 4 |
| Duplex | (SEQ ID | Antisense sequence | Antisense sequence | weeks |
| No. | NO: 1) | (unmodified) | (modified) | (1 mg/kg) |

Human MARC1 transcript region 1

| | | | | |
|---|---|---|---|---|
| D-2066 | 1207- | AUAAUAUUCCAGGACAUACGGUU | asUfsaauaUfuccaggAfcAfuacggsusu | -54.74 |
| | 1227 | (SEQ ID NO: 1053) | (SEQ ID NO: 3324) | |
| D-2063 | 1209- | AUCUAAUAUUCCAGGACAUACUU | asUfscuaaUfauuccaGfgAfcauacsusu | -69.57 |
| | 1229 | (SEQ ID NO: 1054) | (SEQ ID NO: 3321) | |
| D-2142 | 1210- | AAUCUAAUAUUCCAGGACAUAUU | asAfsucuaAfuauuccAfgGfacauasusu | -73.09 |
| | 1230 | (SEQ ID NO: 1055) | (SEQ ID NO: 3394) | |
| D-2301 | 1211- | ACAUCUAAUAUUCCAGGACAUUU | asCfsaucuAfauauucCfaGfgacaususu | -81.85 |
| | 1231 | (SEQ ID NO: 1055) | (SEQ ID NO: 3501) | |
| D-2081 | 1212- | AGCAUCUAAUAUUCCAGGACAUU | asGfscaucUfaauauuCfcAfggacasusu | -87.30¹ |
| | 1232 | (SEQ ID NO: 1057) | (SEQ ID NO: 3339) | |
| D-2080 | 1213- | AGGCAUCUAAUAUUCCAGGACUU | asGfsgcauCfuaauauUfcCfaggacsusu | -88.32² |
| | 1233 | (SEQ ID NO: 1058) | (SEQ ID NO: 3338) | |
| D-2078 | 1214- | AAGGCAUCUAAUAUUCCAGGAUU | asAfsggcaUfcuaauaUfuCfcaggasusu | -86.49² |
| | 1234 | (SEQ ID NO: 1059) | (SEQ ID NO: 3336) | |
| D-2077 | 1215- | AAAGGCAUCUAAUAUUCCAGGUU | asAfsaggcAfucuaauAfuUfccaggsusu | -87.22 |
| | 1235 | (SEQ ID NO: 1060) | (SEQ ID NO: 3335) | |
| D-2076 | 1216- | AAAAGGCAUCUAAUAUUCCAGUU | asAfsaaggCfaucuaaUfaUfuccagsusu | -86.21 |
| | 1236 | (SEQ ID NO: 1061) | (SEQ ID NO: 3334) | |
| D-2113 | 1219- | UUUAAAAGGCAUCUAAUAUUCUU | usUfsuaaaAfggcaucUfaAfuauucsusu | -76.41 |
| | 1239 | (SEQ ID NO: 1196) | (SEQ ID NO: 3371) | |
| D-2108 | 1227- | AGAACAUUUUUAAAAGGCAUCUU | asGfsaacaUfuuuuaaAfaGfgcaucsusu | -79.83 |
| | 1247 | (SEQ ID NO: 1197) | (SEQ ID NO: 3366) | |
| D-2067 | 1248- | AUUCAAGUGUUGUCAUUUUUGUU | asUfsucaaGfuguuguCfaUfuuuugsusu | -27.15 |
| | 1268 | (SEQ ID NO: 969) | (SEQ ID NO: 3325) | |

Human MARC1 transcript region 2

| | | | | |
|---|---|---|---|---|
| D-2013 | 1344- | AAUUGAAGCAUUGAGACACCAUU | asAfsuugaAfgcauugAfgAfcaccasusu | -17.3 |
| | 1364 | (SEQ ID NO: 842) | (SEQ ID NO: 2754) | |
| D-2304 | 1345- | ACAUUGAAGCAUUGAGACACCUU | asCfsauugAfagcauuGfaGfacaccsusu | -67.08 |
| | 1365 | (SEQ ID NO: 843) | (SEQ ID NO: 3504) | |
| D-2305 | 1346- | AACAUUGAAGCAUUGAGACACUU | asAfscauuGfaagcauUfgAfgacacsusu | -71.92 |
| | 1366 | (SEQ ID NO: 844) | (SEQ ID NO: 3505) | |
| D-2047 | 1347- | AGACAUUGAAGCAUUGAGACAUU | asGfsacauUfgaagcaUfuGfagacasusu | -58.4 |
| | 1367 | (SEQ ID NO: 845) | (SEQ ID NO: 2788) | |
| D-2306 | 1349- | UGGGACAUUGAAGCAUUGAGAUU | usGfsggacAfuugaagCfaUfugagasusu | -64.17 |
| | 1369 | (SEQ ID NO: 846) | (SEQ ID NO: 3506) | |
| D-2052 | 1350- | AUGGGACAUUGAAGCAUUGAGUU | asUfsgggaCfauugaaGfcAfuugagsusu | -84.66³ |
| | 1370 | (SEQ ID NO: 847) | (SEQ ID NO: 2793) | |
| D-2042 | 1352- | AACUGGGACAUUGAAGCAUUGUU | asAfscuggGfacauugAfaGfcauugsusu | -73.61⁴ |
| | 1372 | (SEQ ID NO: 848) | (SEQ ID NO: 2783) | |
| D-2307 | 1353- | ACACUGGGACAUUGAAGCAUUUU | asCfsacugGfgacauuGfaAfgcauususu | -57.28 |
| | 1373 | (SEQ ID NO: 973) | (SEQ ID NO: 3507) | |
| D-2308 | 1354- | UGCACUGGGACAUUGAAGCAUUU | usGfscacuGfggacauUfgAfagcaususu | -54.28 |
| | 1374 | (SEQ ID NO: 849) | (SEQ ID NO: 3508) | |
| D-2043 | 1355- | UUGCACUGGGACAUUGAAGCAUU | usUfsgcacUfgggacaUfuGfaagcasusu | -72.11 |
| | 1375 | (SEQ ID NO: 850) | (SEQ ID NO: 2784) | |
| D-2075 | 1362- | UUACUUUUUGCACUGGGACAUUU | usUfsacuuUfuugcacUfgGfgacaususu | -52.85 |
| | 1382 | (SEQ ID NO: 1220) | (SEQ ID NO: 3333) | |

Human MARC1 transcript region 3

| | | | | |
|---|---|---|---|---|
| D-2017 | 2014- | UAGAUAUUGGGUUUUAAACAAUU | usAfsgauaUfuggguuUfuAfaacaasusu | -70.1 |
| | 2034 | (SEQ ID NO: 914) | (SEQ ID NO: 2758) | |
| D-2105 | 2039- | UAGAGUUAUACAAUCAGUUAAUU | usAfsgaguUfauacaaUfcAfguuaasusu | -70.02 |
| | 2059 | (SEQ ID NO: 1333) | (SEQ ID NO: 3363) | |
| D-2106 | 2040- | UUAGAGUUAUACAAUCAGUUAUU | usUfsagagUfuauacaAfuCfaguuasusu | -64.34 |
| | 2060 | (SEQ ID NO: 1334) | (SEQ ID NO: 3364) | |
| D-2065 | 2048- | AUCAGAUCUUAGAGUUAUACAUU | asUfscagaUfcuuagaGfuUfauacasusu | -73.42 |
| | 2068 | (SEQ ID NO: 1073) | (SEQ ID NO: 3323) | |
| D-2302 | 2050- | UCAUCAGAUCUUAGAGUUAUAUU | usCfsaucaGfaucuuaGfaGfuuauasusu | -72.03 |
| | 2070 | (SEQ ID NO: 1074) | (SEQ ID NO: 3502) | |
| D-2143 | 2051- | UUCAUCAGAUCUUAGAGUUAUUU | usUfscaucAfgaucuuAfgAfguuaususu | -47.83 |
| | 2071 | (SEQ ID NO: 1075) | (SEQ ID NO: 3395) | |
| D-2082 | 2052- | AUUCAUCAGAUCUUAGAGUUAUU | asUfsucauCfagaucuUfaGfaguuasusu | -74.89 |
| | 2072 | (SEQ ID NO: 1075) | (SEQ ID NO: 3340) | |
| D-2137 | 2053- | ACUUCAUCAGAUCUUAGAGUUUU | asCfsuucaUfcagaucUfuAfgaguususu | -28.29 |
| | 2073 | (SEQ ID NO: 1077) | (SEQ ID NO: 3389) | |
| D-2079 | 2054- | UACUUCAUCAGAUCUUAGAGUUU | usAfscuucAfucagauCfuUfagagususu | -78.84² |
| | 2074 | (SEQ ID NO: 1078) | (SEQ ID NO: 3337) | |
| D-2045 | 2057- | AUAUACUUCAUCAGAUCUUAGUU | asUfsauacUfucaucaGfaUfcuuagsusu | -69.65⁵ |
| | 2077 | (SEQ ID NO: 916) | (SEQ ID NO: 2786) | |
| D-2303 | 2058- | AAUAUACUUCAUCAGAUCUUAUU | asAfsuauaCfuucaucAfgAfucuuasusu | -54.08 |
| | 2078 | (SEQ ID NO: 917) | (SEQ ID NO: 3503) | |
| D-2019 | 2079- | AAGGACAAAAUGGCAAUAAAAUU | asAfsggacAfaaauggCfaAfuaaaasusu | -43.07 |
| | 2099 | (SEQ ID NO: 920) | (SEQ ID NO: 2760) | |

¹Average from 1 mg/kg dose groups in studies 3, 6, and 8 (Tables 7, 10, and 12, respectively)
²Average from 1 mg/kg dose groups in studies 3 and 6 (Tables 7 and 10, respectively)
³Average from 1 mg/kg dose groups in studies 2 and 5 (Tables 6 and 9, respectively)
⁴Average from 1 mg/kg dose groups in studies 1, 4, 5, 6, 7, 9, 10, 12, and 13 (Tables 5, 8, 9, 10, 11, 13, 14, 16 and 17, respectively)
⁵Average from 1 mg/kg dose groups in studies 1 and 13 (Tables 5 and 17, respectively)

### Example 5. Efficacy of mARC1 siRNA in Treatment of NASH in a Mouse Model

[0228] To determine whether inhibition of mARC1 expression may be therapeutic for fatty liver diseases, mice on a 0.2% cholesterol diet (TD190883 diet) were administered an siRNA molecule targeting the mouse Marc1 gene or a control siRNA molecule. The TD190883 diet contains 0.2% cholesterol, 20% fructose, 12% sucrose, and 22% hydrogenated vegetable oil (HVO). Similar diets have been shown to induce features of NAFLD and NASH in mice placed on the diet over several weeks (see, e.g., Zhong et al., Digestion, Vol. 101:522-535, 2020 and Kroh et al., Gastroenterol Res Pract. Vol. 2020:7347068, 2020, doi:10.1155/2020/7347068).

[0229] 6-week-old male c57BL/6 mice (Charles River Laboratories) were fed standard chow (Harlan, 2020× Teklad global soy protein-free extruded rodent diet) or 0.2% cholesterol diet (TD190883, Envigo). Mice on the 0.2% cholesterol diet received, by subcutaneous injection, buffer alone (phosphate-buffered saline), mARC1-targeted siRNA (duplex no. D-1000), or a control siRNA (duplex no. D-1002) at 3 mg/kg body weight in 0.2 ml buffer once every two weeks for 24 weeks. The siRNA molecules were synthesized and conjugated to a trivalent GalNAc moiety (structure shown in Formula VII) as described in Example 2. The structure of each of the siRNA molecules is provided in Tables 1 and 2. Animals were fasted and harvested on week 24 for further analysis. Liver total RNA from harvested animals was processed for qPCR analysis and serum parameters were measured by clinical analyzer (AU400 Chemistry Analyzer, Olympus). mRNA levels were first normalized to 18S ribosomal RNA levels in each liver sample, and then compared to the expression levels in the chow control group. Data were presented as relative fold over expression in the chow control group. Liver tissues were homogenized and extracted by isopropanol for total cholesterol and total triglyceride measurement (ThermoFisher, Infinity cholesterol and Infinity triglyceride). All animal housing conditions and research protocols were approved by the Amgen Institutional Animal Care and Use Committee (IACUC). Mice were housed in a specified-pathogen free, AAALAC, Intl-accredited facility in ventilated microisolators. Procedures and housing rooms were positively pressured and regulated on a 12:12 dark:light cycle. All animals received reverse-osmosis purified water ad libitum via an automatic watering system.

[0230] Liver expression of both mARC1 and mARC2 was reduced in mice fed the 0.2% cholesterol diet. mARC1 expression, but not mARC2 expression, was further reduced in animals treated with the mARC1-targeted siRNA (FIGS. 5A and 5B). As expected, mice on the 0.2% cholesterol diet had increased serum levels of liver enzymes (AST and ALT), cholesterol, LDL-cholesterol (LDL-C) and HDL-cholesterol (HDL-C) over the course of the study (FIGS. 6A-6E). Treatment with the mARC1-targeted siRNA reduced the diet-induced increases in serum cholesterol, LDL-C and HDL-C (FIGS. 6C-6E). The mARC1 siRNA treatment also showed a trend in reducing diet-induced serum levels of liver enzymes (FIGS. 6A-6B). Animals on the 0.2% cholesterol diet had increased body and liver weight after 24 weeks (FIGS. 7A and 7B). Triglyceride and cholesterol levels in the liver were also increased in animals on the 0.2% cholesterol diet at 24 weeks (FIGS. 7C and 7D). mARC1 siRNA treatment did not significantly reduce the diet-induced increases in body weight, liver weight, liver triglyceride levels or liver cholesterol levels (FIGS. 7A-7D).

[0231] In sum, the results of this study show that inhibition of mARC1 liver expression with a mARC1-targeted siRNA molecule reduces serum cholesterol, LDL-C, HDL-C, and liver enzymes in a mouse model of NASH, suggesting that mARC1 siRNA molecules may be a novel therapeutic approach for treating this disease and other fatty liver disorders.

### Example 6. Impact of Mismatches on Potency of mARC1 siRNA Molecules

[0232] To assess the effect of base pair mismatches on the potency of mARC1 siRNA molecules, analogs of a subset of the most potent siRNA molecules were synthesized to have a different nucleotide at positions 6 or 8 from the 5′ end of the antisense strand such that a base pair mismatch was created at that position when the antisense strand hybridized to its target region of the mARC1 mRNA transcript. However, in each analog, the sequence of the sense strand was designed to be fully complementary to the sequence of the antisense strand so no mismatches were created between the sense and antisense strands in the siRNA duplex. The unmodified and modified sequences for each of the mismatch analogs (duplex nos. D-2514 to D-2561) and the parental siRNA molecules (duplex nos. D-2052, D-2072, D-2076, D-2077, D-2079, D-2081, D-2105, D-2108, D-2111, D-2113, D-2115, D-2118, D-2142, D-2136, D-2189, D-2196, D-2238, D-2241, D-2254, D-2258, D-2301, D-2462, D-2465, and D-2510) are provided in Tables 1 and 2, respectively. The efficacy of the mismatch analogs and the parental siRNA molecules in reducing human mARC1 mRNA levels was evaluated in Hep3B cells using the in vitro RNA FISH assay described in Example 3 above. Ten different concentrations of each of the siRNA molecules ranging from 100 nM to 5 pM were tested, and IC50 and maximum activity values were calculated from the dose response curves as described in Example 3. The results of these assays are shown in Table 24 below.

TABLE 24
In vitro efficacy of mARC1 siRNA mismatch analogs in Hep3B cells

| | Target site | Mismatch | | |
|---|---|---|---|---|
| | within human | Position | | |
| | MARC1 | from 5′ end | | |
| | transcript (SEQ | of antisense | | Max |
| Duplex No. | ID NO: 1) | strand | IC50 [M] | Activity |
| D-2254 | 985-1005 | none | 4.17E−09 | −83.59 |
| D-2514 | 985-1005 | 6 | — | −74.91 |
| D-2515 | 985-1005 | 8 | 2.97E−08 | −78.35 |
| D-2462 | 1092-1114 | none | 6.9E−10 | −93.14 |
| D-2516 | 1092-1114 | 6 | 2.00E−08 | −79.30 |
| D-2517 | 1092-1114 | 8 | 1.54E−09 | −87.85 |
| D-2142 | 1210-1230 | none | 6.82E−10 | −90.23 |
| D-2518 | 1210-1230 | 6 | 3.34E−09 | −82.58 |
| D-2519 | 1210-1230 | 8 | 4.63E−09 | −85.78 |
| D-2301 | 1211-1231 | none | 3.3E−10 | −84.34 |
| D-2520 | 1211-1231 | 6 | 7.59E−09 | −79.51 |
| D-2521 | 1211-1231 | 8 | 1.49E−08 | −70.30 |
| D-2081 | 1212-1232 | none | 5.88E−10 | −86.84 |
| D-2522 | 1212-1232 | 6 | 2.91E−09 | −85.61 |
| D-2523 | 1212-1232 | 8 | 2.33E−09 | −89.43 |
| D-2241 | 1215-1233 | none | 1.26E−09 | −86.29 |
| D-2524 | 1215-1233 | 6 | 2.51E−08 | −82.90 |
| D-2525 | 1215-1233 | 8 | 5.49E−09 | −85.28 |
| D-2258 | 1214-1234 | none | 7.55E−10 | −81.90 |
| D-2526 | 1214-1234 | 6 | 3.37E−09 | −86.17 |
| D-2527 | 1214-1234 | 8 | 2.24E−08 | −73.80 |
| D-2077 | 1215-1235 | none | 4.42E−10 | −87.32 |
| D-2528 | 1215-1235 | 6 | 5.33E−09 | −86.59 |
| D-2529 | 1215-1235 | 8 | 5.6E−09 | −86.43 |
| D-2076 | 1216-1236 | none | 5.41E−10 | −89.64 |
| D-2530 | 1216-1236 | 6 | 1.79E−08 | −82.25 |
| D-2531 | 1216-1236 | 8 | 2.52E−09 | −82.91 |
| D-2113 | 1219-1239 | none | 5.86E−10 | −86.53 |
| D-2532 | 1219-1239 | 6 | 1.10E−08 | −82.08 |
| D-2533 | 1219-1239 | 8 | 6.44E−09 | −76.61 |
| D-2108 | 1227-1247 | none | 1.44E−09 | −85.90 |
| D-2534 | 1227-1247 | 6 | 4.7E−09 | −78.40 |
| D-2535 | 1227-1247 | 8 | 3.69E−09 | −85.20 |
| D-2111 | 1314-1334 | none | 2.78E−10 | −88.86 |
| D-2536 | 1314-1334 | 6 | — | −31.51 |
| D-2537 | 1314-1334 | 8 | 4.7E−09 | −83.69 |
| D-2052 | 1350-1370 | none | 5.75E−10 | −80.89 |
| D-2538 | 1350-1370 | 6 | 1.49E−08 | −75.03 |
| D-2539 | 1350-1370 | 8 | 2.19E−09 | −81.35 |
| D-2189 | 1352-1372 | none | 1.49E−09 | −85.52 |
| D-2540 | 1352-1372 | 6 | — | −76.77 |
| D-2541 | 1352-1372 | 8 | 4.1E−09 | −88.64 |
| D-2136 | 1385-1405 | none | 9.11E−10 | −84.91 |
| D-2542 | 1385-1405 | 6 | — | −16.91 |
| D-2543 | 1385-1405 | 8 | 3.21E−08 | −70.17 |
| D-2238 | 1438-1458 | none | 7.37E−10 | −77.36 |
| D-2544 | 1438-1458 | 6 | 1.12E−08 | −61.11 |
| D-2545 | 1438-1458 | 8 | 7.51E−09 | −82.10 |
| D-2072 | 1506-1526 | none | 8.57E−10 | −87.83 |
| D-2546 | 1506-1526 | 6 | 8.49E−09 | −83.30 |
| D-2547 | 1506-1526 | 8 | 2.68E−09 | −87.92 |
| D-2115 | 1997-2017 | none | 5.67E−10 | −82.42 |
| D-2548 | 1997-2017 | 6 | 8.32E−09 | −84.98 |
| D-2549 | 1997-2017 | 8 | 2.82E−09 | −83.58 |
| D-2196 | 2016-2034 | none | 1.38E−09 | −82.91 |
| D-2550 | 2016-2034 | 6 | 1.85E−08 | −78.12 |
| D-2551 | 2016-2034 | 8 | — | −75.52 |
| D-2105 | 2039-2059 | none | 7.52E−10 | −89.10 |
| D-2552 | 2039-2059 | 6 | 1.45E−08 | −83.79 |
| D-2553 | 2039-2059 | 8 | 4.00E−09 | −82.31 |
| D-2465 | 2052-2072 | none | 5.98E−10 | −84.77 |
| D-2554 | 2052-2072 | 6 | 6.74E−09 | −77.83 |
| D-2555 | 2052-2072 | 8 | 2.05E−09 | −86.44 |
| D-2079 | 2054-2074 | none | 4.03E−10 | −85.54 |
| D-2556 | 2054-2074 | 6 | 2.74E−09 | −71.14 |
| D-2557 | 2054-2074 | 8 | 3.57E−09 | −84.85 |
| D-2510 | 2082-2102 | none | 4.08E−10 | −81.51 |
| D-2558 | 2082-2102 | 6 | 2.35E−08 | −62.54 |
| D-2559 | 2082-2102 | 8 | 1.61E−09 | −84.40 |
| D-2118 | 2086-2106 | none | 4.64E−10 | −82.20 |
| D-2560 | 2086-2106 | 6 | 9.57E−09 | −75.61 |
| D-2561 | 2086-2106 | 8 | 7.37E−09 | −83.48 |

[0233] For the majority of the molecules, the mismatches at positions 6 and 8, which are located within the seed region of the antisense strand, did not significantly affect the maximum knockdown activity or the potency of the siRNA molecules as compared to the parental molecules in which the antisense strand was fully complementary to the target mARC1 mRNA sequence. These results are somewhat surprising as the seed region of the antisense strand (i.e. nucleotides 2 to 8 from the 5′ end) is believed to be important for on-target efficacy.

### Example 7. In Vivo Efficacy of mARC1 siRNA Molecules in Non-Human Primates

[0234] Efficacy and pharmacokinetic profile of three different mARC1 siRNA molecules (duplex nos. D-2241, D-2081, or D-2258) were evaluated in cynomolgus monkeys. Each of the three different mARC1 siRNA molecules had antisense strand sequences that cross-reacted with the cynomolgus monkey (Macaca fascicularis) MARC1 gene. Female treatment-naïve cynomolgus macaque monkeys, ages 22 to 48 months, of Mauritius origin were sourced from Charles River Laboratories, Inc. Research Model Services (Houston, Tex.). Animals (n=3 per treatment group) were administered a single 3 mg/kg subcutaneous (s.c.) injection into the scapular and mid-dorsal region of GalNAc-conjugated mARC1 siRNA molecule, either duplex no. D-2241, D-2081, or D-2258, formulated in 1× phosphate buffered saline. Serum was prepared from whole blood collected at the following time points post-dose: 0.083, 0.25, 1, 2, 4, 24, 28, 96, 168, 264, 336, 456, 528, 576, 720, 864, and 1056 hours. Surgical liver biopsies (approximately 100 mg tissue per left and right liver lobe) were collected under anesthesia at pre-treatment (either days −13 or −7) and days 14 and 30 post-dose. Day 44 post-dose liver samples were collected at necropsy.

### Serum and Liver Pharmacokinetics

[0235] To determine the serum and liver pharmacokinetic profiles of each of the GalNAc-conjugated mARC1 siRNA molecules, serum and liver samples collected at different time points following treatment with a single 3 mg/kg s.c. dose of the mARC1 siRNA molecules were analyzed for each of the mARC1 siRNA molecules (antisense and sense strands) using a plate-based oligonucleotide electro-chemiluminescent (POE) immunoassay similar to that described in Thayer et al., Sci. Rep., Vol. 10(1): 10425, 2020. Oligonucleotide capture (biotin) and detection (digoxygenin) probes were custom synthesized from Qiagen Inc. (Hilden, Germany), the sequences for which are listed in Table 25 below. Liver samples were homogenized in lysis buffer containing 50 mM Tris HCl, 100 nM NaCl, 0.1% Triton X100, and Roche protease inhibitor cocktail (11836170001) to a final concentration of 200 mg/mL. For the bioanalysis, GalNAc-mARC1 siRNA standards were spiked into serum or liver homogenate over a concentration range of 0.13 to 2500 ng/mL. Standards and biological samples were then diluted 1:10 in a 96 well PCR plate to a final volume of 50 μL. Oligonucleotide capture and detection probes were prepared in a hybridization buffer consisting of 60 mM Na₂PO₄ (pH 7.0, dibasic), 1 M NaCl, 5 mM EDTA, and 0.02% Tween 20. Probes were combined and added to the PCR plate at a final concentration of 10 nM bringing the total sample volume to 100 μL per well. Hybridization was performed using a thermal cycler under the following conditions: 90° C. for 5 minutes, 40° C. for 30 minutes, and a final hold at 12° C. After hybridization, 45 μL of samples were transferred to a Meso Scale Diagnostics, LLC MSD Gold 96-well Streptavidin SECTOR plate (L15SA) and incubated at room temperature for 30 minutes while shaking. The plates were washed with SerCare Life Sciences 1×KPL immunoassay wash solution (5150-0011). After washing, plates were incubated for 1 hour with 50 μL of 0.5 μg/mL ruthenium labeled anti-digoxygenin antibody diluted in ThermoFisher Scientific SuperBlock T20 TBS Blocking Buffer (37536). A final wash was performed prior to the addition of Meso Scale Diagnostics, LLC 1×MSD Read Buffer T (R92TC; 150 μL) and read on a Meso Scale Diagnostics, LLC Meso Sector S 600 instrument. Serum and liver concentrations of the mARC1 siRNA molecules were interpolated from a standard curve using a 4-parameter logistic model and a weighting factor of 1/Y2 in Watson LIMS bioanalytical software version 7.5 (ThermoFisher Scientific). Liver concentrations were converted from units of ng/mL to ng/mg by dividing by 200 mg/mL. Serum pharmacokinetic parameters from 0.083 to 24 hours post-dose were determined using noncompartmental analysis in Phoenix WinNonlin software version 8.3.2.116 (Pharsight).

TABLE 25
POE immunoassay capture and detection probes

| Duplex | | | SEQ |
|---|---|---|---|
| No. | Strand | Sequence (5′→3′)¹ | ID NO: |
| D-2241 | Antisense | /5Biosg/ACCTGGAATA | 3659 |
| D-2241 | Antisense | TTAGATGCCT/3Di_N/ | 3660 |
| D-2241 | Sense | /5Biosg/AAGGCATCTA | 3661 |
| D-2241 | Sense | ATATTCCAGG/3Dig_N/ | 3662 |
| D-2081 | Antisense | /5Biosg/ATGTCCTGGAA | 3663 |
| D-2081 | Antisense | TATTAGATGCT/3Dig_N/ | 3664 |
| D-2081 | Sense | /5Biosg/GCATCTAATA | 3665 |
| D-2081 | Sense | TTCCAGGACA/3Dig_N/ | 3666 |
| D-2258 | Antisense | /5Biosg/CCTGGAATAT | 3667 |
| D-2258 | Antisense | TAGATGCCTT/3Dig_N/ | 3668 |
| D-2258 | Sense | /5Biosg/AGGCATCTAA | 3669 |
| D-2258 | Sense | TATTCCAGGA/3Dig_N/ | 3670 |

¹Underlined base = locked nucleic acid modification; /5Biosg/ = biotin conjugation via a six-carbon linker;
/3Dig_N/ = digoxygenin conjugation via a N-hydroxysuccinimide ester.

[0236] Serum concentration-time profiles for antisense and sense strand concentrations for each of the three different mARC1 siRNA molecules are shown in FIGS. 8A-8F. The mean maximum observed antisense strand concentration (Cmax) in serum was 511, 496, and 321 ng/mL for D-2241, D-2258, and D-2081, respectively, at 2.0 to 4.0 hours post-dose as summarized in Table 26. The mean area under the concentration time curve from the start of dose administration to 24 hours post-dose (AUC_{0-24 hour}) for serum antisense strands was 6399, 5040, and 4137 h*ng/mL for D-2258, D-2241, and D-2081, respectively. The ratio of the serum concentrations of the sense strand to antisense strand for duplex no. D-2258 indicates a potential instability of the duplex with strand separation possibly occurring at the site of injection or in systemic circulation. siRNA liver concentrations for antisense and sense strands on days 14, 30 and 44 post-dose are reported in Table 27. Day 14 liver antisense strand concentrations were greatest for duplex no. D-2081 followed by D-2241 and then D-2258. Consistent with the serum pharmacokinetic profile, the ratio of the liver concentrations of the sense and antisense strands for duplex no. D-2258 indicates strand separation.

TABLE 26
Antisense strand serum pharmacokinetic parameters with a single 3 mg/kg s.c.
dose of mARC1 siRNA molecules in cynomolgus macaque monkeys

| | GalNAc-conjugated mARC1 | | |
|---|---|---|---|
| Pharmacokinetic | siRNA Treatment (duplex no.) | | |
| Parameter¹ | D-2241 | D-2081 | D-2258 |
| Tₘₐₓ (h) | 2.0 | 4.0 | 4.0 |
| Cₘₐₓ (ng/mL) | 511 | 321 | 496 |
| AUC_{0-24 hour} | 5040 | 4137 | 6399 |
| (h*ng/mL) | | | |

¹Tₘₐₓ = the time after dosing at which the maximum observed concentration was observed;
Cₘₐₓ = the maximum observed concentration measured after dosing;
AUC_{0-24 hour} = the area under the concentration versus time curve using the linear trapezoidal method from the start of dose administration to 24 hours post-dose.
N = 3 animals per treatment group.

TABLE 27
Antisense and sense strand liver concentrations with a single 3 mg/kg
s.c. dose of mARC1 siRNA molecules in cynomolgus macaque monkeys

| | GaINAc-conjugated mARC1 siRNA Treatment (duplex no.) | | | | | |
|---|---|---|---|---|---|---|
| | D-2241 | | D-2081 | | D-2258 | |
| | (Mean ± SD; ng/mg) | | (Mean ± SD; ng/mg) | | (Mean ± SD; ng/mg) | |
| | Antisense | Sense | Antisense | Sense | Antisense | Sense |
| Day 14 | 28 ± 11 | 29 ± 6.7 | 39 ± 10 | 20 ± 3.5 | 14 ± 1.1 | 42 ± 3.7 |
| Post-Dose | | | | | | |
| Day 30 | 11 ± 4.5 | 12 ± 1.7 | 4.3 ± 0.37 | 11 ± 1.9 | 7.4 ± 0.60 | 29 ± 1.4 |
| Post-Dose | | | | | | |
| Day 44 | 5.9 ± 3.0 | 0.69 ± 0.29 | 2.4 ± 0.33 | 5.1 ± 0.95 | 5.1 ± 0.57 | 16 ± 3.6 |
| Post-Dose | | | | | | |

SD = standard deviation

Liver mARC1 mRNA Silencing

[0237] The three GalNAc-conjugated mARC1 siRNA molecules (duplex nos. D-2241, D-2081, and D-2258) were evaluated for efficacy in knocking down mARC1 mRNA levels in the liver of cynomolgus macaque monkeys following a 3 mg/kg s.c. dose. RNA was purified from snap frozen liver using the ThermoFisher Scientific MagMAX-96 Total RNA Isolation Kit (AM1830) of which sample integrity (260/280 ratio) and RNA concentrations were determined with a ThermoFisher Scientific NanoDrop 2000 Spectrophotometer (ND-2000). One step reverse transcription-polymerase chain reaction (RT-PCR) was performed using ThermoFisher Scientific's TaqMan™ RNA-to-CT 1-Step Kit (4392938). Reactions were assembled into a 96 well PCR plate by mixing 50 ng of RNA template with 2× TaqMan RT-PCR Mix, 40× TaqMan RT Enzyme Mix, 20× mARC1 primer-probe (IDT, forward primer 5′-TTCAGGATGCGATGT CTATGC-3′ (SEQ ID NO: 3671), reverse primer 5′-TGCCCAAAGAGTGGTGATTT-3′ (SEQ ID NO: 3672), probe 5′-/56-FAM/AGCCGCTGG (SEQ ID NO: 3673)/ZEN/AAACACT GAAGAGTT (SEQ ID NO: 3674)/3IABkFQ/-3′), and 20× glyceraldehyde-3-phosphate dehydrogenase primer-probe (GAPDH; ThermoFisher Scientific, Mf04392546_g1 VIC-MGB). RT-PCR was performed using the ThermoFisher Scientific QuantStudio 7 Flex Real-Time PCR System (4485701) under the following conditions: 48° C. for 30 minutes, and 90° C. for 10 minutes followed by 40 cycles of 90° C. for 15 seconds and 60° C. for 1 minute. mRNA expression for each sample was normalized by taking a ratio of the concentration of the gene of interest (mARC1) over the concentration of the housekeeping gene (GAPDH). Percent (%) of mARC1 mRNA expression post-siRNA dose (days 14, 30, and 44) was then calculated relative to the pre-treatment (days −13 or −7) time point for each animal replicate per treatment group, which was expressed as % remaining of pre-treatment. Percent (%) silencing of mARC1 mRNA transcript was ultimately calculated by subtracting the % remaining of pre-treatment value from 100%. Both mRNA % remaining of pre-treatment and % silencing values are summarized below in Table 28. Duplex no. D-2241 was the most potent GalNAc-conjugated mARC1 siRNA molecule tested, reducing cynomolgus mARC1 liver mRNA to <20% remaining of pre-treatment (>80% silencing) on days 14, 30, and 44 following a single subcutaneous injection.

TABLE 28
Cynomolgus macaque liver mARC1 mRNA silencing with
a single 3 mg/kg s.c. dose of GaINAc-conjugated mARC
siRNA molecules

| | GaINAc- | | | | | | | | | |
|---|---|---|---|---|---|---|---|---|---|---|
| | conjugated | | | | | | | | | |
| | mARC1 siRNA | | | | | | | | | |
| | Treatment | | | | | | | | | |
| | (duplex no.) | D-2241 | | | D-2081 | | | D-2258 | | |
| | Animal Replicate | 1 | 2 | 3 | 1 | 2 | 3 | 1 | 2 | 3 |
| Day 14 | % Remaining of | ND | 0.67 | 0.57 | 29 | 22 | 14 | 20 | 38 | 1.0 |
| Post-Dose | Pre-treatment | (0) | | | | | | | | |
| | % Silencing | 100 | 99 | 99 | 71 | 78 | 86 | 80 | 62 | 99 |
| | % Silencing; | 99 ± 0.58 | | | 78 ± 7.5 | | | 80 ± 19 | | |
| | Mean ± SD | | | | | | | | | |
| Day 30 | % Remaining of | 3.7 | 23 | 22 | 36 | 52 | 21 | 37 | 40 | 57 |
| Post-Dose | Pre-treatment | | | | | | | | | |
| | % Silencing | 96 | 77 | 78 | 64 | 48 | 79 | 63 | 60 | 43 |
| | % Silencing; | 84 ± 11 | | | 64 ± 16 | | | 55 ± 11 | | |
| | Mean ± SD | | | | | | | | | |
| Day 44 | % Remaining of | 0.20 | 23 | 21 | 47 | 41 | 8.8 | 30 | 30 | 28 |
| Post-Dose | Pre-treatment | | | | | | | | | |
| | % Silencing | 100 | 78 | 79 | 53 | 59 | 91 | 70 | 70 | 72 |

| | | | |
|---|---|---|---|
| % Silencing; | 86 ± 12 | 68 ± 21 | 71 ± 1.0 |
| Mean ± SD | | | |

ND = not detected;
SC = subcutaneous;
SD = standard deviation;
Samples in which mARC1 mRNA expression was below the limit of assay detection were denoted as “ND” (not detected) and set to zero.

Liver mARC1 Protein Silencing

[0238] Efficacy of the three GalNAc-conjugated mARC1 siRNA molecules (duplex nos. D-2241, D-2081, and D-2258) in knocking down mARC1 protein levels in the liver of cynomolgus macaque following a 3 mg/kg s.c. dose was also assessed. Snap frozen liver tissue was homogenized at 200 mg/mL in Boston Bioproduct NP-40 Lysis Buffer (BP-119) containing ThermoFisher Scientific Protease Inhibitor Tablets (A32963). Homogenates were then spun down at 10,000×g under 4° C. for 10 minutes and supernatants were transferred to a 2 mL 96 deep-well plate. Supernatants were treated with 1% trifluoroacetic acid in methanol while incubating for 15 minutes at room temperature and shaking at 1400 rpm. Precipitated proteins were pelleted for 15 minutes at 4,000 rpm from which the supernatants were aspirated and the pellets were washed twice with methanol. Resulting proteins were reduced and denatured in a solution containing 10 mM tris(2-carboxyethyl)phosphine (ThermoFisher Scientific, 77720) and 8 M urea for 30 minutes at 37° C. Iodoacetamide (20 mM; ThermoFisher Scientific, A39271) was then added to the samples in 20 mM ammonium bicarbonate buffer and incubated for 30 minutes at room temperature. Tryptic digestion was performed overnight at 37° C. with the addition of 30 μg trypsin (ThermoFisher Scientific, A90058) and 10 pmol of the stable isotopically labeled (SIL) peptide (ThermoFisher Scientific custom peptide; SPLFGQYFVLENPGTIK (SEQ ID NO: 3675)). The digestion reaction was terminated with 20% formic acid and the samples were prepared for solid phase extraction (SPE) desalting (Waters Corporation, 186008052). Prior to loading samples, the SPE plate was conditioned with methanol and washed once with 1% acetonitrile. Samples were added to the conditioned SPE plate and analytes were eluted using 70% acetonitrile. Eluates were resuspended in 10 mM ammonium formate at pH 10 and injected onto an Agilent 1260 Infinity Bio-inert Analytical-scale Fraction Collector (G5664A). The fractionated samples (11th fraction) were resuspended in 0.1% formic acid solution for analysis on a ThermoFisher Scientific Ultimate 3000 ultra-high performance liquid chromatography (LC) system coupled to an Orbitrap Lumos mass spectrometer (MS). The LC method was performed as follows: trapping at 3% acetonitrile/water, 8 μL/minute and analytical gradient at 3.0 to 36% acetonitrile/water over 1.0 to 12.1 minutes, 350 nL/minute, with a column temperature at 45° C. A parallel reaction monitoring experiment was performed on the Orbitrap Fusion Lumos instrument monitoring light- and heavy-labeled peptides SPLFGQYFVLENPGTIK (SEQ ID NO: 3675) at m/z=955.5066 and SPLFGQYFVLENPGTIK (SEQ ID NO: 3675) at m/z=959.5137, respectively. Data was then imported into Skyline 21.1 software (Pino L K et al. The Skyline ecosystem: Informatics for quantitative mass spectrometry proteomics. Mass Spectrom Rev. 2020 May; 39(3):229-244. doi: 10.1002/mas.21540. Epub 2017 Jul. 9.), where the SPLFGQYFVLENPGTIK (SEQ ID NO: 3675) peptide peak area from each sample was normalized to the peak area of the spiked-in SIL peptide SPLFGQYFVLENPGTIK (SEQ ID NO: 3675). The measurement of GAPDH housekeeping protein was performed using the same starting tissue homogenate and precipitated with ice-cold acetone followed by mixing at 1250 rpm for 10 minutes and centrifugation at 3220×g for 15 minutes. The supernatants were aspirated and protein pellets were washed with methanol, dissolved in 50 mM ammonium bicarbonate buffer containing 10 μg trypsin, and digested overnight at 37° C. with mixing at 1000 rpm. The digestion reaction was terminated with 20% formic acid and injected for LC-MS/MS analysis monitoring the GAPDH peptide: LISWYDNEFGYSNR (SEQ ID NO: 3676) at 588.61 and 743.35 m/z. The GAPDH peptide peak area was integrated using SCIEX Analyst software. Protein expression for each sample was normalized by taking a ratio of the concentration of the protein of interest (mARC1) as determined relative to the SIL peptide over the concentration of the housekeeping protein (GAPDH). Percent (%) of mARC1 protein expression post-siRNA dose (days 14, 30, and 44) was then calculated relative to the pre-treatment (days −13 or −7) time point for each animal replicate per treatment group, which was expressed as % remaining of pre-treatment. Percent (%) silencing of mARC1 protein expression was ultimately calculated by subtracting the % remaining of pre-treatment value from 100%. Both protein % remaining of pre-treatment and % silencing values are summarized in Table 29. Duplex no. D-2081 showed the greatest reduction in cynomolgus mARC1 liver protein expression on day 14 post-dose with 89±0.71% silencing following a single subcutaneous injection. On day 30 post-dose, duplex nos. D-2081 and D-2241 decreased protein expression to <20% remaining of pre-treatment with 82±7.8% and 87±11% silencing, respectively, which was maintained or increased through day 44 post-dose.

TABLE 29
Cynomolgus macaque liver mARC1 protein silencing with a single
3 mg/kg s.c. dose of GaINAc-conjugated mARC siRNA molecules

| | GaINAc- | | | | | | | | | |
|---|---|---|---|---|---|---|---|---|---|---|
| | conjugated | | | | | | | | | |
| | mARC1 | | | | | | | | | |
| | siRNA | | | | | | | | | |
| | Treatment | | | | | | | | | |
| | (duplex no.) | D-2241 | | | D-2081 | | | D-2258 | | |
| | Animal Replicate | 1 | 2 | 3 | 1 | 2 | 3 | 1 | 2 | 3 |
| Day | % Remaining of | 34 | 35 | 22 | ND | 11 | 12 | 56 | 68 | 25 |
| 14 | Pre-treatment | | | | (0) | | | | | |
| Post- | % Silencing | 66 | 65 | 78 | N/A | 89 | 88 | 44 | 32 | 75 |
| Dose | % Silencing; | 70 ± 7.2 | | | 89 ± 0.71 | | | 50 ± 22 | | |
| | Mean ± SD | | | | | | | | | |
| Day | % Remaining of | 0.99 | 14 | 22 | ND | 24 | 13 | 39 | 54 | 3.6 |
| 30 | Pre-treatment | | | | (0) | | | | | |
| Post- | % Silencing | 99 | 86 | 78 | N/A | 76 | 87 | 61 | 46 | 96 |
| Dose | % Silencing; | 87 ± 11 | | | 82 ± 7.8 | | | 68 ± 26 | | |
| | Mean ± SD | | | | | | | | | |
| Day | % Remaining of | 10 | 16 | ND | ND | 9 | 12 | 44 | 52 | 14 |
| 44 | Pre-treatment | | | (0) | (0) | | | | | |
| Post- | % Silencing | 90 | 84 | N/A | N/A | 91 | 88 | 56 | 48 | 86 |

| | | | | |
|---|---|---|---|---|
| Dose | % Silencing; | 86 ± 4.2 | 90 ± 2.1 | 64 ± 20 |
| | Mean ± SD | | | |

N/A = not applicable;
ND = not detected;
SC = subcutaneous;
SD = standard deviation; Samples in which mARC1 protein expression was below the limit of assay detection were denoted as “ND” (not detected) and set to zero.

[0239] All publications, patents, and patent applications discussed and cited herein are hereby incorporated by reference in their entireties. It is understood that the disclosed invention is not limited to the particular methodology, protocols and materials described as these can vary. It is also understood that the terminology used herein is for the purposes of describing particular embodiments only and is not intended to limit the scope of the appended claims.

[0240] Those skilled in the art will recognize, or be able to ascertain using no more than routine experimentation, many equivalents to the specific embodiments of the invention described herein. Such equivalents are intended to be encompassed by the following claims.

1. An RNAi construct comprising a sense strand and an antisense strand, wherein the antisense strand comprises a region having a sequence that is substantially complementary to a mARC1 mRNA sequence, and wherein said region comprises at least 15 contiguous nucleotides from an antisense sequence listed in Table 1 or Table 2.

2. The RNAi construct of claim 1, wherein the sense strand comprises a sequence that is sufficiently complementary to the sequence of the antisense strand to form a duplex region of about 15 to about 30 base pairs in length.

3. The RNAi construct of claim 2, wherein the duplex region is about 17 to about 24 base pairs in length.

4. (canceled)

5. The RNAi construct of claim 1, wherein the sense strand and the antisense strand are each independently about 19 to about 30 nucleotides in length.

6. The RNAi construct of claim 5, wherein the sense strand and the antisense strand are each independently about 19 to about 23 nucleotides in length.

7. The RNAi construct of claim 1, wherein the RNAi construct comprises one or two blunt ends.

8. The RNAi construct of claim 1, wherein the RNAi construct comprises one or two nucleotide overhangs of 1 to 4 unpaired nucleotides.

9. (canceled)

10. The RNAi construct of claim 8, wherein the RNAi construct comprises a nucleotide overhang at the 3′ end of the sense strand, the 3′ end of the antisense strand, or the 3′ end of both the sense strand and the antisense strand.

11. The RNAi construct of claim 1, wherein the RNAi construct comprises at least one modified nucleotide.

12. (canceled)

13. The RNAi construct of claim 11, wherein the modified nucleotide is a 2′-fluoro modified nucleotide, a 2′-O-methyl modified nucleotide, a 2′-O-methoxyethyl modified nucleotide, 2′-O-alkyl modified nucleotide, a 2′-O-allyl modified nucleotide, a bicyclic nucleic acid (BNA), a deoxyribonucleotide, or combinations thereof.

14. (canceled)

15. (canceled)

16. The RNAi construct of claim 1, wherein the sense strand comprises an abasic nucleotide as the terminal nucleotide at its 3′ end, its 5′ end, or both its 3′ and 5′ ends.

17. The RNAi construct of claim 16, wherein the abasic nucleotide is linked to the adjacent nucleotide through a 3′-3′ internucleotide linkage or a 5′-5′ internucleotide linkage.

18. The RNAi construct of claim 1, wherein the sense strand, the antisense strand, or both the sense and antisense strands comprise one or more phosphorothioate internucleotide linkages.

19. The RNAi construct of claim 18, wherein the antisense strand comprises two consecutive phosphorothioate internucleotide linkages between the terminal nucleotides at both the 3′ and 5′ ends.

20. The RNAi construct of claim 18, wherein the sense strand comprises a single phosphorothioate internucleotide linkage between the terminal nucleotides at the 3′ end.

21. (canceled)

22. The RNAi construct of claim 1, wherein the antisense strand comprises or consists of a sequence selected from the antisense sequences listed in Table 1 or Table 2.

23. The RNAi construct of claim 1, wherein the antisense strand comprises or consists of a sequence selected from SEQ ID NO: 715; SEQ ID NO: 732; SEQ ID NO: 733; SEQ ID NO: 738; SEQ ID NO: 754; SEQ ID NO: 761; SEQ ID NO: 763; SEQ ID NO: 764; SEQ ID NO: 766; SEQ ID NO: 809; SEQ ID NO: 810; SEQ ID NO: 814; SEQ ID NO: 841; SEQ ID NO: 848; SEQ ID NO: 851; SEQ ID NO: 862; SEQ ID NO: 916; SEQ ID NO: 1057; SEQ ID NO: 1078; SEQ ID NO: 2919; SEQ ID NO: 2926; SEQ ID NO: 2946; SEQ ID NO: 2949; SEQ ID NO: 2953; and SEQ ID NO: 2956.

24-26. (canceled)

27. The RNAi construct of claim 1, wherein:
(i) the sense strand comprises or consists of the sequence of SEQ ID NO: 409 and the antisense strand comprises or consists of the sequence of SEQ ID NO: 1078;
(ii) the sense strand comprises or consists of the sequence of SEQ ID NO: 388 and the antisense strand comprises or consists of the sequence of SEQ ID NO: 1057;
(iii) the sense strand comprises or consists of the sequence of SEQ ID NO: 2808 and the antisense strand comprises or consists of the sequence of SEQ ID NO: 2926;
(iv) the sense strand comprises or consists of the sequence of SEQ ID NO: 2820 and the antisense strand comprises or consists of the sequence of SEQ ID NO: 2946;
(v) the sense strand comprises or consists of the sequence of SEQ ID NO: 391 and the antisense strand comprises or consists of the sequence of SEQ ID NO: 2949;
(vi) the sense strand comprises or consists of the sequence of SEQ ID NO: 390 and the antisense strand comprises or consists of the sequence of SEQ ID NO: 2956;
(vii) the sense strand comprises or consists of the sequence of SEQ ID NO: 179 and the antisense strand comprises or consists of the sequence of SEQ ID NO: 2919;
(viii) the sense strand comprises or consists of the sequence of SEQ ID NO: 388 and the antisense strand comprises or consists of the sequence of SEQ ID NO: 2953; or
(ix) the sense strand comprises or consists of the sequence of SEQ ID NO: 388 and the antisense strand comprises or consists of the sequence of SEQ ID NO: 1057.

28. The RNAi construct of claim 27, wherein:
(i) the sense strand comprises or consists of the sequence of modified nucleotides according to SEQ ID NO: 3078 and the antisense strand comprises or consists of the sequence of modified nucleotides according to SEQ ID NO: 3337;
(ii) the sense strand comprises or consists of the sequence of modified nucleotides according to SEQ ID NO: 3080 and the antisense strand comprises or consists of the sequence of modified nucleotides according to SEQ ID NO: 3339;
(iii) the sense strand comprises or consists of the sequence of modified nucleotides according to SEQ ID NO: 3163 and the antisense strand comprises or consists of the sequence of modified nucleotides according to SEQ ID NO: 3441;
(iv) the sense strand comprises or consists of the sequence of modified nucleotides according to SEQ ID NO: 3183 and the antisense strand comprises or consists of the sequence of modified nucleotides according to SEQ ID NO: 3469;
(v) the sense strand comprises or consists of the sequence of modified nucleotides according to SEQ ID NO: 3076 and the antisense strand comprises or consists of the sequence of modified nucleotides according to SEQ ID NO: 3472;
(vi) the sense strand comprises or consists of the sequence of modified nucleotides according to SEQ ID NO: 3077 and the antisense strand comprises or consists of the sequence of modified nucleotides according to SEQ ID NO: 3484;
(vii) the sense strand comprises or consists of the sequence of modified nucleotides according to SEQ ID NO: 2051 and the antisense strand comprises or consists of the sequence of modified nucleotides according to SEQ ID NO: 3545;
(viii) the sense strand comprises or consists of the sequence of modified nucleotides according to SEQ ID NO: 3080 and the antisense strand comprises or consists of the sequence of modified nucleotides according to SEQ ID NO: 3481;
(ix) the sense strand comprises or consists of the sequence of modified nucleotides according to SEQ ID NO: 3188 and the antisense strand comprises or consists of the sequence of modified nucleotides according to SEQ ID NO: 3339;
(x) the sense strand comprises or consists of the sequence of modified nucleotides according to SEQ ID NO: 3080 and the antisense strand comprises or consists of the sequence of modified nucleotides according to SEQ ID NO: 3476; or
(xi) the sense strand comprises or consists of the sequence of modified nucleotides according to SEQ ID NO: 3223 and the antisense strand comprises or consists of the sequence of modified nucleotides according to SEQ ID NO: 3517.

29-31. (canceled)

32. An RNAi construct for inhibiting expression of a human MARC1 gene in a cell, said RNAi construct comprising a sense strand and an antisense strand that hybridize to form a duplex region of about 15 to about 30 base pairs in length, and wherein the antisense strand comprises a region having a sequence that is substantially complementary to the sequence of at least 15 contiguous nucleotides of nucleotides 1205 to 1250 of SEQ ID NO: 1.

33. The RNAi construct of claim 32, wherein the region of the antisense strand comprises a sequence that is substantially complementary to the sequence of at least 15 contiguous nucleotides of nucleotides 1209 to 1239 of SEQ ID NO: 1.

34. The RNAi construct of claim 32, wherein the region of the antisense strand comprises a sequence of CAUCUAAUAUUCCAG (SEQ ID NO: 3656).

35. (canceled)

36. (canceled)

37. An RNAi construct for inhibiting expression of a human MARC1 gene in a cell, said RNAi construct comprising a sense strand and an antisense strand that hybridize to form a duplex region of about 15 to about 30 base pairs in length, and wherein the antisense strand comprises a region having a sequence that is substantially complementary to the sequence of at least 15 contiguous nucleotides of nucleotides 1345 to 1375 of SEQ ID NO: 1.

38. The RNAi construct of claim 37, wherein the region of the antisense strand comprises a sequence of UGGGACAUUGAAGCA (SEQ ID NO: 3657).

39. (canceled)

40. (canceled)

41. An RNAi construct for inhibiting expression of a human MARC1 gene in a cell, said RNAi construct comprising a sense strand and an antisense strand that hybridize to form a duplex region of about 15 to about 30 base pairs in length, and wherein the antisense strand comprises a region having a sequence that is substantially complementary to the sequence of at least 15 contiguous nucleotides of nucleotides 2039 to 2078 of SEQ ID NO: 1.

42. The RNAi construct of claim 41, wherein the region of the antisense strand comprises a sequence that is substantially complementary to the sequence of at least 15 contiguous nucleotides of nucleotides 2048 to 2074 of SEQ ID NO: 1.

43. The RNAi construct of claim 41, wherein the region of the antisense strand comprises a sequence of AUCAGAUCUUAGAGU (SEQ ID NO: 3658).

44-63. (canceled)

64. The RNAi construct of claim 1, wherein the RNAi construct further comprises a ligand.

65. The RNAi construct of claim 64, wherein the ligand comprises a cholesterol moiety, a vitamin, a steroid, a bile acid, a folate moiety, a fatty acid, a carbohydrate, a glycoside, or antibody or antigen-binding fragment thereof.

66. The RNAi construct of claim 64, wherein the ligand comprises galactose, galactosamine, or N-acetyl-galactosamine.

67. The RNAi construct of claim 66, wherein the ligand comprises a multivalent galactose moiety or multivalent N-acetyl-galactosamine moiety.

68. The RNAi construct of claim 67, wherein the multivalent galactose moiety or multivalent N-acetyl-galactosamine moiety is trivalent or tetravalent.

69. The RNAi construct of claim 64, wherein the ligand is covalently attached to the sense strand optionally through a linker.

70. The RNAi construct of claim 69, wherein the ligand is covalently attached to the 5′ end of the sense strand.

71. A pharmaceutical composition comprising the RNAi construct of claim 1 and a pharmaceutically acceptable carrier or excipient.

72. A method for reducing the expression of mARC1 protein in a patient in need thereof comprising administering to the patient the RNAi construct of claim 1.

73-76. (canceled)

77. A method for treating, preventing, or reducing the risk of developing fatty liver disease in a patient in need thereof comprising administering to the patient the RNAi construct of claim 1.

78. The method of claim 77, wherein the fatty liver disease is nonalcoholic fatty liver disease or nonalcoholic steatohepatitis.

79. (canceled)

80. (canceled)

81. A method for treating, preventing, or reducing liver fibrosis in a patient in need thereof comprising administering to the patient the RNAi construct of claim 1.

82-97. (canceled)

The application's sequence listing, which the Patent Office published only in electronic form, follows.

SEQUENCE LISTING (3676 sequences)

SEQ ID NO: 1 - DNA, 7439 bp, Homo sapiens
agctgagccaccacctcccactccccgcgccgccccccagaaggacgcactgctctgattggcccggaagggttcaggagctgcccagcctttgggctcggggccaaaggccgcaccttcccccagcggccccgggcgaccagcgcgctccggccttgccgccgccacctcgcggagaagccagccatgggcgccgccggctcctccgcgctggcgcgctttgtcctcctcgcgcaatcccggcccgggtggctcggggttgccgcgctgggcctgaccgcggtggcgctgggggctgtcgcctggcgccgcgcatggcccacgcggcgccggcggctgctgcagcaggtgggcacagtggcgcagctctggatctaccctgtgaaatcctgcaagggggtgccggtgagcgaggcggagtgcacggccatggggctgcgcagcggcaacctgcgggacaggttttggcttgtgatcaaccaggagggaaacatggttactgctcgccaggaacctcgcctggtcctgatttccctgacctgcgatggtgacaccctgactctcagtgcagcctacacaaaggacctactactgcctatcaaaacgcccaccacaaatgcagtgcacaagtgcagagtgcacggcctggagatagagggcagggactgtggcgaggccaccgcccagtggataaccagcttcctgaagtcacagccctaccgcctggtgcacttcgagcctcacatgcgaccgagacgtcctcatcaaatagcagacttgttccgacccaaggaccagattgcttactcagacaccagcccattcttgatcctttctgaggcgtcgctggcggatctcaactccaggctagagaagaaagttaaagcaaccaacttcaggcccaatattgtaatttcaggatgcgatgtctatgcagaggattcttgggatgagcttcttattggtgacgtggaactgaaaagggtgatggcttgttccagatgcattttaaccacagtggacccagacaccggtgtcatgagcaggaaggaaccgctggaaacactgaagagttatcgccagtgtgacccttcagaacgaaagttatatggaaaatcaccactctttgggcagtattttgtgctggaaaacccagggaccatcaaagtgggagaccctgtgtacctgctgggccagtaatgggaaccgtatgtcctggaatattagatgccttttaaaaatgttctcaaaaatgacaacacttgaagcatggtgtttcagaactgagacctctacattttctttaaatttgtgattttcacatttttcgtcttttggacttctggtgtctcaatgcttcaatgtcccagtgcaaaaagtaaagaaatatagtctcaataacttagtaggacttcagtaagtcacttaaatgacaagacaggattctgaaaactccccgtttaactgattatggaatagttctttctcctgcttctccgtttatctaccaagagcgcagacttgcatcctgtcactaccactcgttagagaaagagaagaagagaaagaggaagagtgggtgggctggaagaatatcctagaatgtgttattgcccctgttcatgaggtacgcaatgaaaattaaattgcaccccaaatatggctggaatgccacttcccttttcttctcaagccccgggctagcttttgaaatggcataaagactgaggtgaccttcaggaagcactgcagatattaattttccatagatctggatctggccctgctgcttctcagacagcattggatttcctaaaggtgctcaggaggatggttgtgtagtcatggaggacccctggatccttgccattcccctcagctaatgacggagtgctccttctccagttccgggtgaaaaagttctgaattctgtggaggagaagaaaagtgattcagtgatttcagatagactactgaaaacctttaaagggggaaaaggaaagcatatgtcagttgtttaaaacccaatatctattttttaactgattgtataactctaagatctgatgaagtatattttttattgccattttgtcctttgattatattgggaagttgactaaacttgaaaaatgtttttaaaactgtgaataaatggaagctactttgactagtttcagatcttactaacttcttggcacaaagttagactgtgaaagctgactgaggctgggcacaggggctcatgcctgtaattccagcactttgggaggccaaggtgggagaatggcttgagcccaggagtttgagaccagcccagaaaatataatgggatcctgtcgctacaaaatgtttttaaaatgcactcggtgtggtggtgtgtgcctgcagtcctggctatggctactcgggaggatgaggtagaaggattggttgagcccaggagcgggagattgaggctgcagtgagttatgattgcaccactacactccagcctgagtgatagagtgagaccctatctctaaaaaagaaacaggaaaaaaaaagaaagctgactgaggtgaatgggcaaagccagtaattctgacacctgaccacagctgggtcttctgcataatggacctcctcacccacagcctcccaggcaagcacccatgtttgaaggactatcaagtcaacatgctttttaccaaaagctgcacatttttcactttgattttataaaagaggtcagtaatcgctgaaatctagctgagccctgaagtaaagttctgagcaaagaggtgcatgtgcttgttttatggttggtgaattattacagtttgttttctgcatgcttggcatgaggtgaataattacatcaattttccagagaacctgggccatcaccttccccaacaagtccagttgatgttgaaactacagatagattgagacaaagcgaagtgttcagcaagtagcattactaatgggaccgggggacccgtgggagagtgagtgtacacaggatttaggaaaccatgtgaatatgggctctctgggaatagccaataggtagggagcaatcagaaacccaaggtttggtggctcttcctaggtatttataattagtggcaagtgaaagccttagtcctgaatttctaaccacttgtaagaactaacagccacttctctgtgccccgtccgggcagtaaccatcattctccatggacaggctctcggggtagctagctctgcagggcagcacccacgtggaagggagcacccagaaaccctcctcactgggcagacctgtccttctgtgcctcacagtgtgaggaagattcctgtttgaagagagaagttccagtgacctctagaatctcagagtagttgccaagctttctgtcagtgagatttaaaggccatttacttgtgtttattttatatttaatgagttggttaatgccagagacaaagctgatatcccatttattttggatactgagcatttgcacactattccacttgaaatatagaatcaggaatgtaggccatcccagactttcagatcttacaacagcaaatgacagatgtttgagatcaggccaaaatatccaccctcggtgggcatctcctctgtgtggcaacttatgctgcagccacagtggggagtcacaaactcagagctggaggtcttgaaaaggacaatgtgggccaggctccggaggggctgcctaaaggcttgcttttgtgactctcctgcagaaaatgttagaaacttccaaccgaaagacgagggcagcaacttatacacacgaaggcagaaagaaattggggaaggggaggctgttggaattcaggccgttgtcctatagggagaaatactcctcctctccttctccctttactgataacggggcatggtgaggagatgagcttgtgagggtctgccagtttggtaagagtgcatggggaggttgggtaaattagactagccaaatgggacttcgggaaaccatttatgaggctgtcaccaacagtgatggcaggctgaaattccaggcaagtgctcccagcattccaagagtgtatcaaattaaagcaacccatgatggtggagaacagatacattaaagttccttgaaaatgacagagtggctctcagaccagaccttgattgtgggtataatcggagtgttgctaccacaccctaacactgcatttcccgtgttttattggtccatggaattctgaaagtttgcctttcgggatgcttctaaaaacaattccatggaccagtaagtttggaaagtcctgcgtgcctcacttctcttcaaaggcaaaaggctctggagaggccttcatgaagacatctgtgtttaatgctgcccttcccaaaggtctgtttttgactgtcttttgagaaatgatcctctgatctctaggcagaatgccagtgagccaaggaatcccagttagcaggaggggtgcactcatgggaagactgaagaagttaaaagttcccgccaagtgaaggagacctatcttgggacacttccccttgtcctctcccttgcccctcttgctggagtaaaaggatggaactgggacttgataggttaaaggaggtgtggagaagtgtcttagaccagctctcctgttgtgggccttagggagaagcactctctttcttcgggatcattttccaaacatgcatttttggatggatagggtggatcagggtgagggaagggaaaccaaactctctctaaccttgcccttacagcaatacctgtgatgtaagttacaaaaccacctgtgatgaaagtgctccaggatgcttcatgcaccagggaggggtgccctgtttctcttctgctagcttctcctttcttttttttttttcttcttttttttgagacagtgtctcactctgttgccaggctggagtgcagtggtgagatctcagctcactgcagcctctgcctcccaggttcaagcaattcttctgcctcagcctcccgagtagctggtgtgtctggagttggttccttctggtgggttcttggtctcgctgacttcaagaatgaagccacagaccttcgcagtgagtgttacagctcttaaaggtggcacggacccaaagtgagcagtagcaagatttattgtggagagcgaaagaacaaagcttcggaaggggacccaaatgggctgctgctgctggctggggtggccaccttttattcccttatttgtccctgcccatgtcctgctgattgctccattttacagagtgctgattggtccattttacagagtgctgattggtgcatttacaatcctttagctagacacagagtgccgattggtgagtttttacagtgctgattggtgcatttacaatcctttagctagacacagaacactgactggtgcatttataatcctctagctagaaagaaaagttctccaagtccccactagacccaggaagtccagctggcttcacctctcactgggactacaggtgcacaccaccacacccagctaatttttgtatttttagtagagacggggtttcaccatgttgttcaggatggtctcgaactcttgatctcgtgatctgcccgcctcggcctcccaaagtgctgggattacagttgtgagccaccacgcccggccctagcttttcctttctgttgcaagtcctctcaactagtgttgccttccaccctacaaagcagaattacctcagaagtcctatggccctgactctatctatgtctgcacaaagcactactgtgctttgctgtctgcaagaacagagattgtttgcttcaaccactttctctgaatggatgaatgagttatgatgatatctaaagttacccaatttcaagcaagaggaagaatctggctcggtaccacagatgttcttggaattgggatagtaaaaaagtccctgaggcatcccttggtctgctctgaccacactctcttcacaggaagaggcttgggccacagctctgactataactctgctcttcctccaaacacagctgaggaattgggtggtggggcacctgctcccatgctctgtggcctggctcagagagaagagttgccttaattacattattattcttcctggacaggctgtaggttgtgtaaagtaacaaaaaggactgagaagtgacttcccattcagcctcttccaaggccatttttgataggcaggtcaaattcactcacatttggttatttgttggccagtctagtgcattcacccttgctggtcctcagtcatgctcctttacctttacagagcatcctagactgctcttcctcttaccttccttgtgaaacccacaacccctagtccctccccttccctggcatttgttatgccctctaccaatccctgacctggtattggtcagtctccaatcctggtggatccctgtgggaactaagttaagtctaacttttgtctccctctttagaatttactgggagtactgtaaataaactattgttgttataattatttctgattaacatttttacacctaacaaagtctcagagagattgaatttactgggttgaagggaggagcaccttccacatgacctgcccagcaattaaagccgcttgttagtccgaggcccaggacggccgaggacagctggagagctcttcgttgcaggcagctctggttaacatcaaccgggaaagctctttgtaaacacatgaataattgatcgtccagcgctcacatagctaccgcggatctgagcccgtatgactcatttgcgagccattcctgtcgtctggatgccataacattggaggaatgatgatcgtttcttggaggttcttctgtggccagagttgccaagaccaaggctgtaatggtttgttatgatgacctttgttattccattaggctcaattgctttaaaaaatgatgtgtgcatactttaggaacgtttttaccctttatgttgacctgacatcatagtttatattataaaatgtattaatgacagaagagtgttttcatgtcccaaggacaaattttaacaaccataatctgccctcagtcatcataaatataaatgtattggtcaaacagatctcgttaatgtggccaagataaatgcaagtctatattttaaggcagtcgaagtcctagagaatatatctggagcttttgtggggctaagagatcttgtatatatgctatcaaaaggctgagaaaattaacatgttcccccctctgattttgcattggacagatataaatgtcttggggatgtcaagtaagattgttcacatagtttctggacaccattaatgcctgatggggtgaatcttagttcttaaagctatattctgctcattatgctcacagggcttttgaaaagagaacaaaataaagatttcaagtcttagc

SEQ ID NO: 2 - RNA, 20 nt, Artificial Sequence
  synthetic polynucleotide
gagcaagcacuauauggaau

SEQ ID NO: 3 - RNA, 20 nt, Artificial Sequence
  synthetic polynucleotide
agaaguucucggcaaaugau

SEQ ID NO: 4 - RNA, 20 nt, Artificial Sequence
  synthetic polynucleotide
gagcaagcugaauuuggaau

SEQ ID NO: 5 - RNA, 20 nt, Artificial Sequence
  synthetic polynucleotide
agaaguucagcgcuaaugau

SEQ ID NO: 6 - RNA, 20 nt, Artificial Sequence
  synthetic polynucleotide
gaaggacgcacugcucugau

SEQ ID NO: 7 - RNA, 20 nt, Artificial Sequence
  synthetic polynucleotide
aggacgcacugcucugauug

SEQ ID NO: 8 - RNA, 20 nt, Artificial Sequence
  synthetic polynucleotide
ggacgcacugcucugauugg

SEQ ID NO: 9 - RNA, 20 nt, Artificial Sequence
  synthetic polynucleotide
acgcacugcucugauuggcc

SEQ ID NO: 10 - RNA, 20 nt, Artificial Sequence
  synthetic polynucleotide
cugcucugauuggcccggaa

SEQ ID NO: 11 - RNA, 20 nt, Artificial Sequence
  synthetic polynucleotide
ugcucugauuggcccggaag

SEQ ID NO: 12 - RNA, 20 nt, Artificial Sequence
  synthetic polynucleotide
gcucugauuggcccggaagg

SEQ ID NO: 13 - RNA, 20 nt, Artificial Sequence
  synthetic polynucleotide
cggggccaaaggccgcaccu

SEQ ID NO: 14 - RNA, 20 nt, Artificial Sequence
  synthetic polynucleotide
ggggccaaaggccgcaccuu

SEQ ID NO: 15 - RNA, 20 nt, Artificial Sequence
  synthetic polynucleotide
gccaaaggccgcaccuuccc

SEQ ID NO: 16 - RNA, 20 nt, Artificial Sequence
  synthetic polynucleotide
ccaaaggccgcaccuucccc

SEQ ID NO: 17 - RNA, 20 nt, Artificial Sequence
  synthetic polynucleotide
cgccaccucgcggagaagcc

SEQ ID NO: 18 - RNA, 20 nt, Artificial Sequence
  synthetic polynucleotide
gccaccucgcggagaagcca

SEQ ID NO: 19 - RNA, 20 nt, Artificial Sequence
  synthetic polynucleotide
ccaccucgcggagaagccag

SEQ ID NO: 20 - RNA, 20 nt, Artificial Sequence
  synthetic polynucleotide
accucgcggagaagccagcc

SEQ ID NO: 21 - RNA, 20 nt, Artificial Sequence
  synthetic polynucleotide
ugaucaaccaggagggaaac

SEQ ID NO: 22 - RNA, 20 nt, Artificial Sequence
  synthetic polynucleotide
aucaaccaggagggaaacau

SEQ ID NO: 23 - RNA, 20 nt, Artificial Sequence
  synthetic polynucleotide
ucaaccaggagggaaacaug

SEQ ID NO: 24 - RNA, 20 nt, Artificial Sequence
  synthetic polynucleotide
caaccaggagggaaacaugg

SEQ ID NO: 25 - RNA, 20 nt, Artificial Sequence
  synthetic polynucleotide
aaccaggagggaaacauggu

SEQ ID NO: 26 - RNA, 20 nt, Artificial Sequence
  synthetic polynucleotide
accaggagggaaacaugguu

SEQ ID NO: 27 - RNA, 20 nt, Artificial Sequence
  synthetic polynucleotide
ugcucgccaggaaccucgcc

SEQ ID NO: 28 - RNA, 20 nt, Artificial Sequence
  synthetic polynucleotide
cucgccaggaaccucgccug

SEQ ID NO: 29 - RNA, 20 nt, Artificial Sequence
  synthetic polynucleotide
ggaaccucgccugguccuga

SEQ ID NO: 30 - RNA, 20 nt, Artificial Sequence
  synthetic polynucleotide
aaccucgccugguccugauu

SEQ ID NO: 31 - RNA, 20 nt, Artificial Sequence
  synthetic polynucleotide
accucgccugguccugauuu

SEQ ID NO: 32 - RNA, 20 nt, Artificial Sequence
  synthetic polynucleotide
ccucgccugguccugauuuc

SEQ ID NO: 33 - RNA, 20 nt, Artificial Sequence
  synthetic polynucleotide
cucgccugguccugauuucc

SEQ ID NO: 34 - RNA, 20 nt, Artificial Sequence
  synthetic polynucleotide
ccugguccugauuucccuga

SEQ ID NO: 35 - RNA, 20 nt, Artificial Sequence
  synthetic polynucleotide
gacucucagugcagccuaca

SEQ ID NO: 36 - RNA, 20 nt, Artificial Sequence
  synthetic polynucleotide
cucucagugcagccuacaca

SEQ ID NO: 37 - RNA, 20 nt, Artificial Sequence
  synthetic polynucleotide
ucucagugcagccuacacaa

SEQ ID NO: 38 - RNA, 20 nt, Artificial Sequence
  synthetic polynucleotide
cucagugcagccuacacaaa

SEQ ID NO: 39 - RNA, 20 nt, Artificial Sequence
  synthetic polynucleotide
ucagugcagccuacacaaag

SEQ ID NO: 40 - RNA, 20 nt, Artificial Sequence
  synthetic polynucleotide
cuaucaaaacgcccaccaca

SEQ ID NO: 41 - RNA, 20 nt, Artificial Sequence
  synthetic polynucleotide
uaucaaaacgcccaccacaa

SEQ ID NO: 42 - RNA, 20 nt, Artificial Sequence
  synthetic polynucleotide
aucaaaacgcccaccacaaa

SEQ ID NO: 43 - RNA, 20 nt, Artificial Sequence
  synthetic polynucleotide
ucaaaacgcccaccacaaau

SEQ ID NO: 44 - RNA, 20 nt, Artificial Sequence
  synthetic polynucleotide
aaacgcccaccacaaaugca

SEQ ID NO: 45 - RNA, 20 nt, Artificial Sequence
  synthetic polynucleotide
aacgcccaccacaaaugcag

SEQ ID NO: 46 - RNA, 20 nt, Artificial Sequence
  synthetic polynucleotide
ccaguggauaaccagcuucc

SEQ ID NO: 47 - RNA, 20 nt, Artificial Sequence
  synthetic polynucleotide
caguggauaaccagcuuccu

SEQ ID NO: 48 - RNA, 20 nt, Artificial Sequence
  synthetic polynucleotide
guggauaaccagcuuccuga

SEQ ID NO: 49 - RNA, 20 nt, Artificial Sequence
  synthetic polynucleotide
gauaaccagcuuccugaagu

SEQ ID NO: 50 - RNA, 20 nt, Artificial Sequence
  synthetic polynucleotide
aucaaauagcagacuuguuc

SEQ ID NO: 51 - RNA, 20 nt, Artificial Sequence
  synthetic polynucleotide
caaauagcagacuuguuccg

SEQ ID NO: 52 - RNA, 20 nt, Artificial Sequence
  synthetic polynucleotide
aaauagcagacuuguuccga

SEQ ID NO: 53 - RNA, 20 nt, Artificial Sequence
  synthetic polynucleotide
ugagcuucuuauuggugacg

SEQ ID NO: 54 - RNA, 20 nt, Artificial Sequence
  synthetic polynucleotide
agcuucuuauuggugacgug

SEQ ID NO: 55 - RNA, 20 nt, Artificial Sequence
  synthetic polynucleotide
gcuucuuauuggugacgugg

SEQ ID NO: 56 - RNA, 20 nt, Artificial Sequence
  synthetic polynucleotide
uucuuauuggugacguggaa

SEQ ID NO: 57 - RNA, 20 nt, Artificial Sequence
  synthetic polynucleotide
uuggugacguggaacugaaa

SEQ ID NO: 58 - RNA, 20 nt, Artificial Sequence
  synthetic polynucleotide
uggugacguggaacugaaaa

SEQ ID NO: 59 - RNA, 20 nt, Artificial Sequence
  synthetic polynucleotide
ggugacguggaacugaaaag

SEQ ID NO: 60 - RNA, 20 nt, Artificial Sequence
  synthetic polynucleotide
gugacguggaacugaaaagg

SEQ ID NO: 61 - RNA, 20 nt, Artificial Sequence
  synthetic polynucleotide
gcuuguuccagaugcauuuu

SEQ ID NO: 62 - RNA, 20 nt, Artificial Sequence
  synthetic polynucleotide
guuccagaugcauuuuaacc

SEQ ID NO: 63 - RNA, 20 nt, Artificial Sequence
  synthetic polynucleotide
uuccagaugcauuuuaacca

SEQ ID NO: 64 - RNA, 20 nt, Artificial Sequence
  synthetic polynucleotide
ugcauuuuaaccacagugga

SEQ ID NO: 65 - RNA, 20 nt, Artificial Sequence
  synthetic polynucleotide
gcauuuuaaccacaguggac

SEQ ID NO: 66 - RNA, 20 nt, Artificial Sequence
  synthetic polynucleotide
ggugucaugagcaggaagga

SEQ ID NO: 67 - RNA, 20 nt, Artificial Sequence
  synthetic polynucleotide
gaaccgcuggaaacacugaa

SEQ ID NO: 68 - RNA, 20 nt, Artificial Sequence
  synthetic polynucleotide
gcuggaaacacugaagaguu

SEQ ID NO: 69 - RNA, 20 nt, Artificial Sequence
  synthetic polynucleotide
ggaaacacugaagaguuauc

SEQ ID NO: 70 - RNA, 20 nt, Artificial Sequence
  synthetic polynucleotide
gaaacacugaagaguuaucg

SEQ ID NO: 71 - RNA, 20 nt, Artificial Sequence
  synthetic polynucleotide
aaacacugaagaguuaucgc

SEQ ID NO: 72 - RNA, 20 nt, Artificial Sequence
  synthetic polynucleotide
aacacugaagaguuaucgcc

SEQ ID NO: 73 - RNA, 20 nt, Artificial Sequence
  synthetic polynucleotide
acacugaagaguuaucgcca

SEQ ID NO: 74 - RNA, 20 nt, Artificial Sequence
  synthetic polynucleotide
cacugaagaguuaucgccag

SEQ ID NO: 75 - RNA, 20 nt, Artificial Sequence
  synthetic polynucleotide
acugaagaguuaucgccagu

SEQ ID NO: 76 - RNA, 20 nt, Artificial Sequence
  synthetic polynucleotide
cugaagaguuaucgccagug

SEQ ID NO: 77 - RNA, 20 nt, Artificial Sequence
  synthetic polynucleotide
ugaagaguuaucgccagugu

SEQ ID NO: 78 - RNA, 20 nt, Artificial Sequence
  synthetic polynucleotide
gaagaguuaucgccagugug

SEQ ID NO: 79 - RNA, 20 nt, Artificial Sequence
  synthetic polynucleotide
gaguuaucgccagugugacc

SEQ ID NO: 80 - RNA, 20 nt, Artificial Sequence
  synthetic polynucleotide
aguuaucgccagugugaccc

SEQ ID NO: 81 - RNA, 20 nt, Artificial Sequence
  synthetic polynucleotide
guuaucgccagugugacccu

SEQ ID NO: 82 - RNA, 20 nt, Artificial Sequence
  synthetic polynucleotide
uuaucgccagugugacccuu

SEQ ID NO: 83 - RNA, 20 nt, Artificial Sequence
  synthetic polynucleotide
cgccagugugacccuucaga

SEQ ID NO: 84 - RNA, 20 nt, Artificial Sequence
  synthetic polynucleotide
gccagugugacccuucagaa

SEQ ID NO: 85 - RNA, 20 nt, Artificial Sequence
  synthetic polynucleotide
cagugugacccuucagaacg

SEQ ID NO: 86 - RNA, 20 nt, Artificial Sequence
  synthetic polynucleotide
agugugacccuucagaacga

SEQ ID NO: 87 - RNA, 20 nt, Artificial Sequence
  synthetic polynucleotide
gugugacccuucagaacgaa

SEQ ID NO: 88 - RNA, 20 nt, Artificial Sequence
  synthetic polynucleotide
ugugacccuucagaacgaaa

SEQ ID NO: 89 - RNA, 20 nt, Artificial Sequence
  synthetic polynucleotide
gugacccuucagaacgaaag

SEQ ID NO: 90 - RNA, 20 nt, Artificial Sequence
  synthetic polynucleotide
ugacccuucagaacgaaagu

SEQ ID NO: 91 - RNA, 20 nt, Artificial Sequence
  synthetic polynucleotide
gacccuucagaacgaaaguu

SEQ ID NO: 92 - RNA, 20 nt, Artificial Sequence
  synthetic polynucleotide
acccuucagaacgaaaguua

SEQ ID NO: 93 - RNA, 20 nt, Artificial Sequence
  synthetic polynucleotide
cccuucagaacgaaaguuau

SEQ ID NO: 94 - RNA, 20 nt, Artificial Sequence
  synthetic polynucleotide
ccuucagaacgaaaguuaua

SEQ ID NO: 95 - RNA, 20 nt, Artificial Sequence
  synthetic polynucleotide
cuucagaacgaaaguuauau

SEQ ID NO: 96 - RNA, 20 nt, Artificial Sequence
  synthetic polynucleotide
uucagaacgaaaguuauaug

SEQ ID NO: 97 - RNA, 20 nt, Artificial Sequence
  synthetic polynucleotide
ucagaacgaaaguuauaugg

SEQ ID NO: 98 - RNA, 20 nt, Artificial Sequence
  synthetic polynucleotide
cagaacgaaaguuauaugga

SEQ ID NO: 99 - RNA, 20 nt, Artificial Sequence
  synthetic polynucleotide
aguuauauggaaaaucacca

SEQ ID NO: 100 - RNA, 20 nt, Artificial Sequence
  synthetic polynucleotide
uuauauggaaaaucaccacu

SEQ ID NO: 101 - RNA, 20 nt, Artificial Sequence
  synthetic polynucleotide
aauagcagacuuguuccgac

SEQ ID NO: 102 - RNA, 20 nt, Artificial Sequence
  synthetic polynucleotide
auagcagacuuguuccgacc

SEQ ID NO: 103 - RNA, 20 nt, Artificial Sequence
  synthetic polynucleotide
uagcagacuuguuccgaccc

SEQ ID NO: 104 - RNA, 20 nt, Artificial Sequence
  synthetic polynucleotide
agcagacuuguuccgaccca

SEQ ID NO: 105 - RNA, 20 nt, Artificial Sequence
  synthetic polynucleotide
gcagacuuguuccgacccaa

SEQ ID NO: 106 - RNA, 20 nt, Artificial Sequence
  synthetic polynucleotide
cagacuuguuccgacccaag

SEQ ID NO: 107 - RNA, 20 nt, Artificial Sequence
  synthetic polynucleotide
agacuuguuccgacccaagg

SEQ ID NO: 108 - RNA, 20 nt, Artificial Sequence
  synthetic polynucleotide
gacuuguuccgacccaagga

SEQ ID NO: 109 - RNA, 20 nt, Artificial Sequence
  synthetic polynucleotide
acuuguuccgacccaaggac

SEQ ID NO: 110 - RNA, 20 nt, Artificial Sequence
  synthetic polynucleotide
cuuguuccgacccaaggacc

SEQ ID NO: 111 - RNA, 20 nt, Artificial Sequence
  synthetic polynucleotide
uuccgacccaaggaccagau

SEQ ID NO: 112 - RNA, 20 nt, Artificial Sequence
  synthetic polynucleotide
aaggaccagauugcuuacuc

SEQ ID NO: 113 - RNA, 20 nt, Artificial Sequence
  synthetic polynucleotide
gaccagauugcuuacucaga

SEQ ID NO: 114 - RNA, 20 nt, Artificial Sequence
  synthetic polynucleotide
ccagauugcuuacucagaca

SEQ ID NO: 115 - RNA, 20 nt, Artificial Sequence
  synthetic polynucleotide
cagauugcuuacucagacac

SEQ ID NO: 116 - RNA, 20 nt, Artificial Sequence
  synthetic polynucleotide
agauugcuuacucagacacc

SEQ ID NO: 117 - RNA, 20 nt, Artificial Sequence
  synthetic polynucleotide
gauugcuuacucagacacca

SEQ ID NO: 118 - RNA, 20 nt, Artificial Sequence
  synthetic polynucleotide
auugcuuacucagacaccag

SEQ ID NO: 119 - RNA, 20 nt, Artificial Sequence
  synthetic polynucleotide
gcuuacucagacaccagccc

SEQ ID NO: 120 - RNA, 20 nt, Artificial Sequence
  synthetic polynucleotide
uuacucagacaccagcccau

SEQ ID NO: 121 - RNA, 20 nt, Artificial Sequence
  synthetic polynucleotide
cggaucucaacuccaggcua

SEQ ID NO: 122 - RNA, 20 nt, Artificial Sequence
  synthetic polynucleotide
ggaucucaacuccaggcuag

SEQ ID NO: 123 - RNA, 20 nt, Artificial Sequence
  synthetic polynucleotide
gaucucaacuccaggcuaga

SEQ ID NO: 124 - RNA, 20 nt, Artificial Sequence
  synthetic polynucleotide
aucucaacuccaggcuagag

SEQ ID NO: 125 - RNA, 20 nt, Artificial Sequence
  synthetic polynucleotide
aacuccaggcuagagaagaa

SEQ ID NO: 126 - RNA, 20 nt, Artificial Sequence
  synthetic polynucleotide
agaagaaaguuaaagcaacc

SEQ ID NO: 127 - RNA, 20 nt, Artificial Sequence
  synthetic polynucleotide
gaagaaaguuaaagcaacca

SEQ ID NO: 128 - RNA, 20 nt, Artificial Sequence
  synthetic polynucleotide
aagaaaguuaaagcaaccaa

SEQ ID NO: 129 - RNA, 20 nt, Artificial Sequence
  synthetic polynucleotide
agaaaguuaaagcaaccaac

SEQ ID NO: 130 - RNA, 20 nt, Artificial Sequence
  synthetic polynucleotide
gaaaguuaaagcaaccaacu

SEQ ID NO: 131 - RNA, 20 nt, Artificial Sequence
  synthetic polynucleotide
aaaguuaaagcaaccaacuu

SEQ ID NO: 132 - RNA, 20 nt, Artificial Sequence
  synthetic polynucleotide
aaguuaaagcaaccaacuuc

SEQ ID NO: 133 - RNA, 20 nt, Artificial Sequence
  synthetic polynucleotide
aguuaaagcaaccaacuuca

SEQ ID NO: 134 - RNA, 20 nt, Artificial Sequence
  synthetic polynucleotide
guuaaagcaaccaacuucag

SEQ ID NO: 135 - RNA, 20 nt, Artificial Sequence
  synthetic polynucleotide
aaagcaaccaacuucaggcc

SEQ ID NO: 136 - RNA, 20 nt, Artificial Sequence
  synthetic polynucleotide
agcaaccaacuucaggccca

SEQ ID NO: 137 - RNA, 20 nt, Artificial Sequence
  synthetic polynucleotide
caaccaacuucaggcccaau

SEQ ID NO: 138 - RNA, 20 nt, Artificial Sequence
  synthetic polynucleotide
aaccaacuucaggcccaaua

SEQ ID NO: 139 - RNA, 20 nt, Artificial Sequence
  synthetic polynucleotide
ccaacuucaggcccaauauu

SEQ ID NO: 140 - RNA, 20 nt, Artificial Sequence
  synthetic polynucleotide
caacuucaggcccaauauug

SEQ ID NO: 141 - RNA, 20 nt, Artificial Sequence
  synthetic polynucleotide
acuucaggcccaauauugua

SEQ ID NO: 142 - RNA, 20 nt, Artificial Sequence
  synthetic polynucleotide
cuucaggcccaauauuguaa

SEQ ID NO: 143 - RNA, 20 nt, Artificial Sequence
  synthetic polynucleotide
uucaggcccaauauuguaau

SEQ ID NO: 144 - RNA, 20 nt, Artificial Sequence
  synthetic polynucleotide
ucaggcccaauauuguaauu

SEQ ID NO: 145 - RNA, 20 nt, Artificial Sequence
  synthetic polynucleotide
aggcccaauauuguaauuuc

SEQ ID NO: 146 - RNA, 20 nt, Artificial Sequence
  synthetic polynucleotide
ggcccaauauuguaauuuca

SEQ ID NO: 147 - RNA, 20 nt, Artificial Sequence
  synthetic polynucleotide
gaugagcuucuuauugguga

SEQ ID NO: 148 - RNA, 20 nt, Artificial Sequence
  synthetic polynucleotide
augagcuucuuauuggugac

SEQ ID NO: 149 - RNA, 20 nt, Artificial Sequence
  synthetic polynucleotide
auauggaaaaucaccacucu

SEQ ID NO: 150 - RNA, 20 nt, Artificial Sequence
  synthetic polynucleotide
uauggaaaaucaccacucuu

SEQ ID NO: 151 - RNA, 20 nt, Artificial Sequence
  synthetic polynucleotide
auggaaaaucaccacucuuu

SEQ ID NO: 152 - RNA, 20 nt, Artificial Sequence
  synthetic polynucleotide
uggaaaaucaccacucuuug

SEQ ID NO: 153 - RNA, 20 nt, Artificial Sequence
  synthetic polynucleotide
cuggaaaacccagggaccau

SEQ ID NO: 154 - RNA, 20 nt, Artificial Sequence
  synthetic polynucleotide
ggaaaacccagggaccauca

SEQ ID NO: 155 - RNA, 20 nt, Artificial Sequence
  synthetic polynucleotide
gaaaacccagggaccaucaa

SEQ ID NO: 156 - RNA, 20 nt, Artificial Sequence
  synthetic polynucleotide
cccagggaccaucaaagugg

SEQ ID NO: 157 - RNA, 20 nt, Artificial Sequence
  synthetic polynucleotide
ccagggaccaucaaaguggg

SEQ ID NO: 158 - RNA, 20 nt, Artificial Sequence
  synthetic polynucleotide
gggaccaucaaagugggaga

SEQ ID NO: 159 - RNA, 20 nt, Artificial Sequence
  synthetic polynucleotide
gggagacccuguguaccugc

SEQ ID NO: 160 - RNA, 20 nt, Artificial Sequence
  synthetic polynucleotide
guaccugcugggccaguaau

SEQ ID NO: 161 - RNA, 20 nt, Artificial Sequence
  synthetic polynucleotide
ugcugggccaguaaugggaa

SEQ ID NO: 162 - RNA, 20 nt, Artificial Sequence
  synthetic polynucleotide
aaauguucucaaaaaugaca

SEQ ID NO: 163 - RNA, 20 nt, Artificial Sequence
  synthetic polynucleotide
aauguucucaaaaaugacaa

SEQ ID NO: 164 - RNA, 20 nt, Artificial Sequence
  synthetic polynucleotide
aaaaugacaacacuugaagc

SEQ ID NO: 165 - RNA, 20 nt, Artificial Sequence
  synthetic polynucleotide
aaaugacaacacuugaagca

SEQ ID NO: 166 - RNA, 20 nt, Artificial Sequence
  synthetic polynucleotide
aaugacaacacuugaagcau

SEQ ID NO: 167 - RNA, 20 nt, Artificial Sequence
  synthetic polynucleotide
ugacaacacuugaagcaugg

SEQ ID NO: 168 - RNA, 20 nt, Artificial Sequence
  synthetic polynucleotide
gacaacacuugaagcauggu

SEQ ID NO: 169 - RNA, 20 nt, Artificial Sequence
  synthetic polynucleotide
acaacacuugaagcauggug

SEQ ID NO: 170 - RNA, 20 nt, Artificial Sequence
  synthetic polynucleotide
cacuugaagcaugguguuuc

SEQ ID NO: 171 - RNA, 20 nt, Artificial Sequence
  synthetic polynucleotide
cuugaagcaugguguuucag

SEQ ID NO: 172 - RNA, 20 nt, Artificial Sequence
  synthetic polynucleotide
cuggugucucaaugcuucaa

SEQ ID NO: 173 - RNA, 20 nt, Artificial Sequence
  synthetic polynucleotide
uggugucucaaugcuucaau

SEQ ID NO: 174 - RNA, 20 nt, Artificial Sequence
  synthetic polynucleotide
ggugucucaaugcuucaaug

SEQ ID NO: 175 - RNA, 20 nt, Artificial Sequence
  synthetic polynucleotide
gugucucaaugcuucaaugu

SEQ ID NO: 176 - RNA, 20 nt, Artificial Sequence
  synthetic polynucleotide
ugucucaaugcuucaauguc

SEQ ID NO: 177 - RNA, 20 nt, Artificial Sequence
  synthetic polynucleotide
ucucaaugcuucaauguccc

SEQ ID NO: 178 - RNA, 20 nt, Artificial Sequence
  synthetic polynucleotide
cucaaugcuucaauguccca

SEQ ID NO: 179 - RNA, 20 nt, Artificial Sequence
  synthetic polynucleotide
caaugcuucaaugucccagu

SEQ ID NO: 180 - RNA, 20 nt, Artificial Sequence
  synthetic polynucleotide
augcuucaaugucccagugc

SEQ ID NO: 181 - RNA, 20 nt, Artificial Sequence
  synthetic polynucleotide
ugcuucaaugucccagugca

SEQ ID NO: 182 - RNA, 20 nt, Artificial Sequence
  synthetic polynucleotide
aaugacaagacaggauucug

SEQ ID NO: 183 - RNA, 20 nt, Artificial Sequence
  synthetic polynucleotide
augacaagacaggauucuga

SEQ ID NO: 184 - RNA, 20 nt, Artificial Sequence
  synthetic polynucleotide
gacaagacaggauucugaaa

SEQ ID NO: 185 - RNA, 20 nt, Artificial Sequence
  synthetic polynucleotide
aagacaggauucugaaaacu

SEQ ID NO: 186 - RNA, 20 nt, Artificial Sequence
  synthetic polynucleotide
acaggauucugaaaacuccc

SEQ ID NO: 187 - RNA, 20 nt, Artificial Sequence
  synthetic polynucleotide
cccguuuaacugauuaugga

SEQ ID NO: 188 - RNA, 20 nt, Artificial Sequence
  synthetic polynucleotide
uuuaacugauuauggaauag

SEQ ID NO: 189 - RNA, 20 nt, Artificial Sequence
  synthetic polynucleotide
uuaacugauuauggaauagu

SEQ ID NO: 190 - RNA, 20 nt, Artificial Sequence
  synthetic polynucleotide
aacugauuauggaauaguuc

SEQ ID NO: 191 - RNA, 20 nt, Artificial Sequence
  synthetic polynucleotide
acugauuauggaauaguucu

SEQ ID NO: 192 - RNA, 20 nt, Artificial Sequence
  synthetic polynucleotide
cugauuauggaauaguucuu

SEQ ID NO: 193 - RNA, 20 nt, Artificial Sequence
  synthetic polynucleotide
gauuauggaauaguucuuuc

SEQ ID NO: 194 - RNA, 20 nt, Artificial Sequence
  synthetic polynucleotide
auuauggaauaguucuuucu

SEQ ID NO: 195 - RNA, 20 nt, Artificial Sequence
  synthetic polynucleotide
uugcauccugucacuaccac

SEQ ID NO: 196 - RNA, 20 nt, Artificial Sequence
  synthetic polynucleotide
caccccaaauauggcuggaa

SEQ ID NO: 197 - RNA, 20 nt, Artificial Sequence
  synthetic polynucleotide
ccccaaauauggcuggaaug

SEQ ID NO: 198 - RNA, 20 nt, Artificial Sequence
  synthetic polynucleotide
cucaagccccgggcuagcuu

SEQ ID NO: 199 - RNA, 20 nt, Artificial Sequence
  synthetic polynucleotide
ucaagccccgggcuagcuuu

SEQ ID NO: 200 - RNA, 20 nt, Artificial Sequence
  synthetic polynucleotide
aagccccgggcuagcuuuug

SEQ ID NO: 201 - RNA, 20 nt, Artificial Sequence
  synthetic polynucleotide
agccccgggcuagcuuuuga

SEQ ID NO: 202 - RNA, 20 nt, Artificial Sequence
  synthetic polynucleotide
gccccgggcuagcuuuugaa

SEQ ID NO: 203 - RNA, 20 nt, Artificial Sequence
  synthetic polynucleotide
cccgggcuagcuuuugaaau

SEQ ID NO: 204 - RNA, 20 nt, Artificial Sequence
  synthetic polynucleotide
ggcuagcuuuugaaauggca

SEQ ID NO: 205 - RNA, 20 nt, Artificial Sequence
  synthetic polynucleotide
auaaagacugaggugaccuu

SEQ ID NO: 206 - RNA, 20 nt, Artificial Sequence
  synthetic polynucleotide
cugcagauauuaauuuucca

SEQ ID NO: 207 - RNA, 20 nt, Artificial Sequence
  synthetic polynucleotide
gauauuaauuuuccauagau

SEQ ID NO: 208 - RNA, 20 nt, Artificial Sequence
  synthetic polynucleotide
auauuaauuuuccauagauc

SEQ ID NO: 209 - RNA, 20 nt, Artificial Sequence
  synthetic polynucleotide
uaauuuuccauagaucugga

SEQ ID NO: 210 - RNA, 20 nt, Artificial Sequence
  synthetic polynucleotide
aauuuuccauagaucuggau

SEQ ID NO: 211 - RNA, 20 nt, Artificial Sequence
  synthetic polynucleotide
auuuuccauagaucuggauc

SEQ ID NO: 212 - RNA, 20 nt, Artificial Sequence
  synthetic polynucleotide
uuuccauagaucuggaucug

SEQ ID NO: 213 - RNA, 20 nt, Artificial Sequence
  synthetic polynucleotide
ugcuucucagacagcauugg

SEQ ID NO: 214 - RNA, 20 nt, Artificial Sequence
  synthetic polynucleotide
gcuucucagacagcauugga

SEQ ID NO: 215 - RNA, 20 nt, Artificial Sequence
  synthetic polynucleotide
ucagacagcauuggauuucc

SEQ ID NO: 216 - RNA, 20 nt, Artificial Sequence
  synthetic polynucleotide
cagacagcauuggauuuccu

SEQ ID NO: 217 - RNA, 20 nt, Artificial Sequence
  synthetic polynucleotide
agacagcauuggauuuccua

SEQ ID NO: 218 - RNA, 20 nt, Artificial Sequence
  synthetic polynucleotide
uuccuaaaggugcucaggag

SEQ ID NO: 219 - RNA, 20 nt, Artificial Sequence
  synthetic polynucleotide
aggaccccuggauccuugcc

SEQ ID NO: 220 - RNA, 20 nt, Artificial Sequence
  synthetic polynucleotide
cccuggauccuugccauucc

SEQ ID NO: 221 - RNA, 20 nt, Artificial Sequence
  synthetic polynucleotide
cuggauccuugccauucccc

SEQ ID NO: 222 - RNA, 20 nt, Artificial Sequence
  synthetic polynucleotide
ggauccuugccauuccccuc

SEQ ID NO: 223 - RNA, 20 nt, Artificial Sequence
  synthetic polynucleotide
gauccuugccauuccccuca

SEQ ID NO: 224 - RNA, 20 nt, Artificial Sequence
  synthetic polynucleotide
ccuugccauuccccucagcu

SEQ ID NO: 225 - RNA, 20 nt, Artificial Sequence
  synthetic polynucleotide
cuugccauuccccucagcua

SEQ ID NO: 226 - RNA, 20 nt, Artificial Sequence
  synthetic polynucleotide
gccauuccccucagcuaaug

SEQ ID NO: 227 - RNA, 20 nt, Artificial Sequence
  synthetic polynucleotide
cauuccccucagcuaaugac

SEQ ID NO: 228 - RNA, 20 nt, Artificial Sequence
  synthetic polynucleotide
acggagugcuccuucuccag

SEQ ID NO: 229 - RNA, 20 nt, Artificial Sequence
  synthetic polynucleotide
gaaaaccuuuaaagggggaa

SEQ ID NO: 230 - RNA, 20 nt, Artificial Sequence
  synthetic polynucleotide
cauaugucaguuguuuaaaa

SEQ ID NO: 231 - RNA, 20 nt, Artificial Sequence
  synthetic polynucleotide
ucaguuguuuaaaacccaau

SEQ ID NO: 232 - RNA, 20 nt, Artificial Sequence
  synthetic polynucleotide
aguuguuuaaaacccaauau

SEQ ID NO: 233 - RNA, 20 nt, Artificial Sequence
  synthetic polynucleotide
aaggacgcacugcucugauu

SEQ ID NO: 234 - RNA, 20 nt, Artificial Sequence
  synthetic polynucleotide
caagccccgggcuagcuuuu

SEQ ID NO: 235 - RNA, 20 nt, Artificial Sequence
  synthetic polynucleotide
ccccgggcuagcuuuugaaa

SEQ ID NO: 236 - RNA, 20 nt, Artificial Sequence
  synthetic polynucleotide
gacugaggugaccuucagga

SEQ ID NO: 237 - RNA, 20 nt, Artificial Sequence
  synthetic polynucleotide
uauuaauuuuccauagaucu

SEQ ID NO: 238 - RNA, 20 nt, Artificial Sequence
  synthetic polynucleotide
uuuuccauagaucuggaucu

SEQ ID NO: 239 - RNA, 20 nt, Artificial Sequence
  synthetic polynucleotide
uucucagacagcauuggauu

SEQ ID NO: 240 - RNA, 20 nt, Artificial Sequence
  synthetic polynucleotide
uuuccuaaaggugcucagga

SEQ ID NO: 241 - RNA, 20 nt, Artificial Sequence
  synthetic polynucleotide
ccuggauccuugccauuccc

SEQ ID NO: 242 - RNA, 20 nt, Artificial Sequence
  synthetic polynucleotide
uccuugccauuccccucagc

SEQ ID NO: 243 - RNA, 20 nt, Artificial Sequence
  synthetic polynucleotide
ccauuccccucagcuaauga

SEQ ID NO: 244 - RNA, 20 nt, Artificial Sequence
  synthetic polynucleotide
aaaaccuuuaaagggggaaa

SEQ ID NO: 245 - RNA, 20 nt, Artificial Sequence
  synthetic polynucleotide
uuguuuaaaacccaauaucu

SEQ ID NO: 246 - RNA, 20 nt, Artificial Sequence
  synthetic polynucleotide
cucuaagaucugaugaagua

SEQ ID NO: 247 - RNA, 20 nt, Artificial Sequence
  synthetic polynucleotide
cuaagaucugaugaaguaua

SEQ ID NO: 248 - RNA, 20 nt, Artificial Sequence
  synthetic polynucleotide
uaagaucugaugaaguauau

SEQ ID NO: 249 - RNA, 20 nt, Artificial Sequence
  synthetic polynucleotide
aagaucugaugaaguauauu

SEQ ID NO: 250 - RNA, 20 nt, Artificial Sequence
  synthetic polynucleotide
gaugaaguauauuuuuuauu

SEQ ID NO: 251 - RNA, 20 nt, Artificial Sequence
  synthetic polynucleotide
uuuuauugccauuuuguccu

SEQ ID NO: 252 - RNA, 20 nt, Artificial Sequence
  synthetic polynucleotide
uuuauugccauuuuguccuu

SEQ ID NO: 253 - RNA, 20 nt, Artificial Sequence
  synthetic polynucleotide
uuauugccauuuuguccuuu

SEQ ID NO: 254 - RNA, 20 nt, Artificial Sequence
  synthetic polynucleotide
auugccauuuuguccuuuga

SEQ ID NO: 255 - RNA, 20 nt, Artificial Sequence
  synthetic polynucleotide
auauugggaaguugacuaaa

SEQ ID NO: 256 - RNA, 20 nt, Artificial Sequence
  synthetic polynucleotide
ugggaaguugacuaaacuug

SEQ ID NO: 257 - RNA, 20 nt, Artificial Sequence
  synthetic polynucleotide
gggaaguugacuaaacuuga

SEQ ID NO: 258 - RNA, 20 nt, Artificial Sequence
  synthetic polynucleotide
ggaaguugacuaaacuugaa

SEQ ID NO: 259 - RNA, 20 nt, Artificial Sequence
  synthetic polynucleotide
acugugaauaaauggaagcu

SEQ ID NO: 260 - RNA, 20 nt, Artificial Sequence
  synthetic polynucleotide
ugaauaaauggaagcuacuu

SEQ ID NO: 261 - RNA, 20 nt, Artificial Sequence
  synthetic polynucleotide
uaaauggaagcuacuuugac

SEQ ID NO: 262 - RNA, 20 nt, Artificial Sequence
  synthetic polynucleotide
aaauggaagcuacuuugacu

SEQ ID NO: 263 - RNA, 20 nt, Artificial Sequence
  synthetic polynucleotide
aagcuacuuugacuaguuuc

SEQ ID NO: 264 - RNA, 20 nt, Artificial Sequence
  synthetic polynucleotide
agcuacuuugacuaguuuca

SEQ ID NO: 265 - RNA, 20 nt, Artificial Sequence
  synthetic polynucleotide
ggagugcuccuucuccaguu

SEQ ID NO: 266 - RNA, 20 nt, Artificial Sequence
  synthetic polynucleotide
aaccuuuaaagggggaaaag

SEQ ID NO: 267 - RNA, 20 nt, Artificial Sequence
  synthetic polynucleotide
accuuuaaagggggaaaagg

SEQ ID NO: 268 - RNA, 20 nt, Artificial Sequence
  synthetic polynucleotide
uauugccauuuuguccuuug

SEQ ID NO: 269 - RNA, 20 nt, Artificial Sequence
  synthetic polynucleotide
gaaguugacuaaacuugaaa

SEQ ID NO: 270 - RNA, 20 nt, Artificial Sequence
  synthetic polynucleotide
aaguugacuaaacuugaaaa

SEQ ID NO: 271 - RNA, 20 nt, Artificial Sequence
  synthetic polynucleotide
gcuacuuugacuaguuucag

SEQ ID NO: 272 - RNA, 20 nt, Artificial Sequence
  synthetic polynucleotide
ugacucucagugcagccuac

SEQ ID NO: 273 - RNA, 20 nt, Artificial Sequence
  synthetic polynucleotide
acgcccaccacaaaugcagu

SEQ ID NO: 274 - RNA, 20 nt, Artificial Sequence
  synthetic polynucleotide
cccaguggauaaccagcuuc

SEQ ID NO: 275 - RNA, 20 nt, Artificial Sequence
  synthetic polynucleotide
caucaaauagcagacuuguu

SEQ ID NO: 276 - RNA, 20 nt, Artificial Sequence
  synthetic polynucleotide
ucaaauagcagacuuguucc

SEQ ID NO: 277 - RNA, 20 nt, Artificial Sequence
  synthetic polynucleotide
caggcuagagaagaaaguua

SEQ ID NO: 278 - RNA, 20 nt, Artificial Sequence
  synthetic polynucleotide
aggcuagagaagaaaguuaa

SEQ ID NO: 279 - RNA, 20 nt, Artificial Sequence
  synthetic polynucleotide
accaacuucaggcccaauau

SEQ ID NO: 280 - RNA, 20 nt, Artificial Sequence
  synthetic polynucleotide
gagcuucuuauuggugacgu

SEQ ID NO: 281 - RNA, 20 nt, Artificial Sequence
  synthetic polynucleotide
cuucuuauuggugacgugga

SEQ ID NO: 282 - RNA, 20 nt, Artificial Sequence
  synthetic polynucleotide
ucuuauuggugacguggaac

SEQ ID NO: 283 - RNA, 20 nt, Artificial Sequence
  synthetic polynucleotide
auuggugacguggaacugaa

SEQ ID NO: 284 - RNA, 20 nt, Artificial Sequence
  synthetic polynucleotide
cuuguuccagaugcauuuua

SEQ ID NO: 285 - RNA, 20 nt, Artificial Sequence
  synthetic polynucleotide
uguuccagaugcauuuuaac

SEQ ID NO: 286 - RNA, 20 nt, Artificial Sequence
  synthetic polynucleotide
cuggaaacacugaagaguua

SEQ ID NO: 287 - RNA, 20 nt, Artificial Sequence
  synthetic polynucleotide
uggaaacacugaagaguuau

SEQ ID NO: 288 - RNA, 20 nt, Artificial Sequence
  synthetic polynucleotide
aagaguuaucgccaguguga

SEQ ID NO: 289 - RNA, 20 nt, Artificial Sequence
  synthetic polynucleotide
agaguuaucgccagugugac

SEQ ID NO: 290 - RNA, 20 nt, Artificial Sequence
  synthetic polynucleotide
guuauauggaaaaucaccac

SEQ ID NO: 291 - RNA, 20 nt, Artificial Sequence
  synthetic polynucleotide
gugcuggaaaacccagggac

SEQ ID NO: 292 - RNA, 20 nt, Artificial Sequence
  synthetic polynucleotide
ugcuggaaaacccagggacc

SEQ ID NO: 293 - RNA, 20 nt, Artificial Sequence
  synthetic polynucleotide
gcuggaaaacccagggacca

SEQ ID NO: 294 - RNA, 20 nt, Artificial Sequence
  synthetic polynucleotide
aaaacccagggaccaucaaa

SEQ ID NO: 295 - RNA, 20 nt, Artificial Sequence
  synthetic polynucleotide
aaacccagggaccaucaaag

SEQ ID NO: 296 - RNA, 20 nt, Artificial Sequence
  synthetic polynucleotide
aacccagggaccaucaaagu

SEQ ID NO: 297 - RNA, 20 nt, Artificial Sequence
  synthetic polynucleotide
acccagggaccaucaaagug

SEQ ID NO: 298 - RNA, 20 nt, Artificial Sequence
  synthetic polynucleotide
gugggagacccuguguaccu

SEQ ID NO: 299 - RNA, 20 nt, Artificial Sequence
  synthetic polynucleotide
gcugggccaguaaugggaac

SEQ ID NO: 300 - RNA, 20 nt, Artificial Sequence
  synthetic polynucleotide
caaaaaugacaacacuugaa

SEQ ID NO: 301 - RNA, 20 nt, Artificial Sequence
  synthetic polynucleotide
augacaacacuugaagcaug

SEQ ID NO: 302 - RNA, 20 nt, Artificial Sequence
  synthetic polynucleotide
acuugaagcaugguguuuca

SEQ ID NO: 303 - RNA, 20 nt, Artificial Sequence
  synthetic polynucleotide
aaauuugugauuuucacauu

SEQ ID NO: 304 - RNA, 20 nt, Artificial Sequence
  synthetic polynucleotide
aaugcuucaaugucccagug

SEQ ID NO: 305 - RNA, 20 nt, Artificial Sequence
  synthetic polynucleotide
aaaugacaagacaggauucu

SEQ ID NO: 306 - RNA, 20 nt, Artificial Sequence
  synthetic polynucleotide
uuauggaauaguucuuucuc

SEQ ID NO: 307 - RNA, 20 nt, Artificial Sequence
  synthetic polynucleotide
uauggaauaguucuuucucc

SEQ ID NO: 308 - RNA, 20 nt, Artificial Sequence
  synthetic polynucleotide
gaauaguucuuucuccugcu

SEQ ID NO: 309 - RNA, 20 nt, Artificial Sequence
  synthetic polynucleotide
aauaguucuuucuccugcuu

SEQ ID NO: 310 - RNA, 20 nt, Artificial Sequence
  synthetic polynucleotide
ugcauccugucacuaccacu

SEQ ID NO: 311 - RNA, 20 nt, Artificial Sequence
  synthetic polynucleotide
gcauccugucacuaccacuc

SEQ ID NO: 312 - RNA, 20 nt, Artificial Sequence
  synthetic polynucleotide
ccgggcuagcuuuugaaaug

SEQ ID NO: 313 - RNA, 20 nt, Artificial Sequence
  synthetic polynucleotide
cgggcuagcuuuugaaaugg

SEQ ID NO: 314 - RNA, 20 nt, Artificial Sequence
  synthetic polynucleotide
aagacugaggugaccuucag

SEQ ID NO: 315 - RNA, 20 nt, Artificial Sequence
  synthetic polynucleotide
aggugaccuucaggaagcac

SEQ ID NO: 316 - RNA, 20 nt, Artificial Sequence
  synthetic polynucleotide
ccauagaucuggaucuggcc

SEQ ID NO: 317 - RNA, 20 nt, Artificial Sequence
  synthetic polynucleotide
uggauuuccuaaaggugcuc

SEQ ID NO: 318 - RNA, 20 nt, Artificial Sequence
  synthetic polynucleotide
gauuuccuaaaggugcucag

SEQ ID NO: 319 - RNA, 20 nt, Artificial Sequence
  synthetic polynucleotide
uccuaaaggugcucaggagg

SEQ ID NO: 320 - RNA, 20 nt, Artificial Sequence
  synthetic polynucleotide
uggaggaccccuggauccuu

SEQ ID NO: 321 - RNA, 20 nt, Artificial Sequence
  synthetic polynucleotide
ggaggaccccuggauccuug

SEQ ID NO: 322 - RNA, 20 nt, Artificial Sequence
  synthetic polynucleotide
gaggaccccuggauccuugc

SEQ ID NO: 323 - RNA, 20 nt, Artificial Sequence
  synthetic polynucleotide
cggagugcuccuucuccagu

SEQ ID NO: 324 - RNA, 20 nt, Artificial Sequence
  synthetic polynucleotide
agaaggacgcacugcucuga

SEQ ID NO: 325 - RNA, 20 nt, Artificial Sequence
  synthetic polynucleotide
cucugauuggcccggaaggg

SEQ ID NO: 326 - RNA, 20 nt, Artificial Sequence
  synthetic polynucleotide
ucugauuggcccggaagggu

SEQ ID NO: 327 - RNA, 20 nt, Artificial Sequence
  synthetic polynucleotide
cugauuggcccggaaggguu

SEQ ID NO: 328 - RNA, 20 nt, Artificial Sequence
  synthetic polynucleotide
ggccaaaggccgcaccuucc

SEQ ID NO: 329 - RNA, 20 nt, Artificial Sequence
  synthetic polynucleotide
ccucgcggagaagccagcca

SEQ ID NO: 330 - RNA, 20 nt, Artificial Sequence
  synthetic polynucleotide
ggagaagccagccaugggcg

SEQ ID NO: 331 - RNA, 20 nt, Artificial Sequence
  synthetic polynucleotide
gagaagccagccaugggcgc

SEQ ID NO: 332 - RNA, 20 nt, Artificial Sequence
  synthetic polynucleotide
gaucaaccaggagggaaaca

SEQ ID NO: 333 - RNA, 20 nt, Artificial Sequence
  synthetic polynucleotide
acugcucgccaggaaccucg

SEQ ID NO: 334 - RNA, 20 nt, Artificial Sequence
  synthetic polynucleotide
ucgccaggaaccucgccugg

SEQ ID NO: 335 - RNA, 20 nt, Artificial Sequence
  synthetic polynucleotide
gccaggaaccucgccugguc

SEQ ID NO: 336 - RNA, 20 nt, Artificial Sequence
  synthetic polynucleotide
gaaccucgccugguccugau

SEQ ID NO: 337 - RNA, 20 nt, Artificial Sequence
  synthetic polynucleotide
auggugacacccugacucuc

SEQ ID NO: 338 - RNA, 20 nt, Artificial Sequence
  synthetic polynucleotide
uggugacacccugacucuca

SEQ ID NO: 339 - RNA, 20 nt, Artificial Sequence
  synthetic polynucleotide
gacacccugacucucagugc

SEQ ID NO: 340 - RNA, 20 nt, Artificial Sequence
  synthetic polynucleotide
acccugacucucagugcagc

SEQ ID NO: 341 - RNA, 20 nt, Artificial Sequence
  synthetic polynucleotide
ccgcccaguggauaaccagc

SEQ ID NO: 342 - RNA, 20 nt, Artificial Sequence
  synthetic polynucleotide
ccgccuggugcacuucgagc

SEQ ID NO: 343 - RNA, 20 nt, Artificial Sequence
  synthetic polynucleotide
cgccuggugcacuucgagcc

SEQ ID NO: 344 - RNA, 20 nt, Artificial Sequence
  synthetic polynucleotide
gccuggugcacuucgagccu

SEQ ID NO: 345 - RNA, 20 nt, Artificial Sequence
  synthetic polynucleotide
ccuggugcacuucgagccuc

SEQ ID NO: 346 - RNA, 20 nt, Artificial Sequence
  synthetic polynucleotide
cuggugcacuucgagccuca

SEQ ID NO: 347 - RNA, 20 nt, Artificial Sequence
  synthetic polynucleotide
uggugcacuucgagccucac

SEQ ID NO: 348 - RNA, 20 nt, Artificial Sequence
  synthetic polynucleotide
ggugcacuucgagccucaca

SEQ ID NO: 349 - RNA, 20 nt, Artificial Sequence
  synthetic polynucleotide
gugcacuucgagccucacau

SEQ ID NO: 350 - RNA, 20 nt, Artificial Sequence
  synthetic polynucleotide
ugcacuucgagccucacaug

SEQ ID NO: 351 - RNA, 20 nt, Artificial Sequence
  synthetic polynucleotide
gcacuucgagccucacaugc

SEQ ID NO: 352 - RNA, 20 nt, Artificial Sequence
  synthetic polynucleotide
cacuucgagccucacaugcg

SEQ ID NO: 353 - RNA, 20 nt, Artificial Sequence
  synthetic polynucleotide
acuucgagccucacaugcga

SEQ ID NO: 354 - RNA, 20 nt, Artificial Sequence
  synthetic polynucleotide
cuucgagccucacaugcgac

SEQ ID NO: 355 - RNA, 20 nt, Artificial Sequence
  synthetic polynucleotide
uucgagccucacaugcgacc

SEQ ID NO: 356 - RNA, 20 nt, Artificial Sequence
  synthetic polynucleotide
ucgagccucacaugcgaccg

SEQ ID NO: 357 - RNA, 20 nt, Artificial Sequence
  synthetic polynucleotide
cgagccucacaugcgaccga

SEQ ID NO: 358 - RNA, 20 nt, Artificial Sequence
  synthetic polynucleotide
gccucacaugcgaccgagac

SEQ ID NO: 359 - RNA, 20 nt, Artificial Sequence
  synthetic polynucleotide
cuugauccuuucugaggcgu

SEQ ID NO: 360 - RNA, 20 nt, Artificial Sequence
  synthetic polynucleotide
cuggcggaucucaacuccag

SEQ ID NO: 361 - RNA, 20 nt, Artificial Sequence
  synthetic polynucleotide
uggcggaucucaacuccagg

SEQ ID NO: 362 - RNA, 20 nt, Artificial Sequence
  synthetic polynucleotide
gcgaugucuaugcagaggau

SEQ ID NO: 363 - RNA, 20 nt, Artificial Sequence
  synthetic polynucleotide
gaugucuaugcagaggauuc

SEQ ID NO: 364 - RNA, 20 nt, Artificial Sequence
  synthetic polynucleotide
ugucuaugcagaggauucuu

SEQ ID NO: 365 - RNA, 20 nt, Artificial Sequence
  synthetic polynucleotide
gucuaugcagaggauucuug

SEQ ID NO: 366 - RNA, 20 nt, Artificial Sequence
  synthetic polynucleotide
ucuaugcagaggauucuugg

SEQ ID NO: 367 - RNA, 20 nt, Artificial Sequence
  synthetic polynucleotide
cuaugcagaggauucuuggg

SEQ ID NO: 368 - RNA, 20 nt, Artificial Sequence
  synthetic polynucleotide
ggugauggcuuguuccagau

SEQ ID NO: 369 - RNA, 20 nt, Artificial Sequence
  synthetic polynucleotide
gugauggcuuguuccagaug

SEQ ID NO: 370 - RNA, 20 nt, Artificial Sequence
  synthetic polynucleotide
uggcuuguuccagaugcauu

SEQ ID NO: 371 - RNA, 20 nt, Artificial Sequence
  synthetic polynucleotide
cauuuuaaccacaguggacc

SEQ ID NO: 372 - RNA, 20 nt, Artificial Sequence
  synthetic polynucleotide
uuuuaaccacaguggaccca

SEQ ID NO: 373 - RNA, 20 nt, Artificial Sequence
  synthetic polynucleotide
uuuaaccacaguggacccag

SEQ ID NO: 374 - RNA, 20 nt, Artificial Sequence
  synthetic polynucleotide
caccacucuuugggcaguau

SEQ ID NO: 375 - RNA, 20 nt, Artificial Sequence
  synthetic polynucleotide
accacucuuugggcaguauu

SEQ ID NO: 376 - RNA, 20 nt, Artificial Sequence
  synthetic polynucleotide
cuuugggcaguauuuugugc

SEQ ID NO: 377 - RNA, 20 nt, Artificial Sequence
  synthetic polynucleotide
uuugggcaguauuuugugcu

SEQ ID NO: 378 - RNA, 20 nt, Artificial Sequence
  synthetic polynucleotide
uugggcaguauuuugugcug

SEQ ID NO: 379 - RNA, 20 nt, Artificial Sequence
  synthetic polynucleotide
ugggcaguauuuugugcugg

SEQ ID NO: 380 - RNA, 20 nt, Artificial Sequence
  synthetic polynucleotide
ggcaguauuuugugcuggaa

SEQ ID NO: 381 - RNA, 20 nt, Artificial Sequence
  synthetic polynucleotide
uauuuugugcuggaaaaccc

SEQ ID NO: 382 - RNA, 20 nt, Artificial Sequence
  synthetic polynucleotide
auuuugugcuggaaaaccca

SEQ ID NO: 383 - RNA, 20 nt, Artificial Sequence
  synthetic polynucleotide
accguauguccuggaauauu

SEQ ID NO: 384 - RNA, 20 nt, Artificial Sequence
  synthetic polynucleotide
ccguauguccuggaauauua

SEQ ID NO: 385 - RNA, 20 nt, Artificial Sequence
  synthetic polynucleotide
guauguccuggaauauuaga

SEQ ID NO: 386 - RNA, 20 nt, Artificial Sequence
  synthetic polynucleotide
uauguccuggaauauuagau

SEQ ID NO: 387 - RNA, 20 nt, Artificial Sequence
  synthetic polynucleotide
auguccuggaauauuagaug

SEQ ID NO: 388 - RNA, 20 nt, Artificial Sequence
  synthetic polynucleotide
uguccuggaauauuagaugc

SEQ ID NO: 389 - RNA, 20 nt, Artificial Sequence
  synthetic polynucleotide
guccuggaauauuagaugcc

SEQ ID NO: 390 - RNA, 20 nt, Artificial Sequence
  synthetic polynucleotide
uccuggaauauuagaugccu

SEQ ID NO: 391 - RNA, 20 nt, Artificial Sequence
  synthetic polynucleotide
ccuggaauauuagaugccuu

SEQ ID NO: 392 - RNA, 20 nt, Artificial Sequence
  synthetic polynucleotide
cuggaauauuagaugccuuu

SEQ ID NO: 393 - RNA, 20 nt, Artificial Sequence
  synthetic polynucleotide
caugguguuucagaacugag

SEQ ID NO: 394 - RNA, 20 nt, Artificial Sequence
  synthetic polynucleotide
augguguuucagaacugaga

SEQ ID NO: 395 - RNA, 20 nt, Artificial Sequence
  synthetic polynucleotide
ugguguuucagaacugagac

SEQ ID NO: 396 - RNA, 20 nt, Artificial Sequence
  synthetic polynucleotide
gguguuucagaacugagacc

SEQ ID NO: 397 - RNA, 20 nt, Artificial Sequence
  synthetic polynucleotide
gaggagaagaaaagugauuc

SEQ ID NO: 398 - RNA, 20 nt, Artificial Sequence
  synthetic polynucleotide
agaagaaaagugauucagug

SEQ ID NO: 399 - RNA, 20 nt, Artificial Sequence
  synthetic polynucleotide
gaagaaaagugauucaguga

SEQ ID NO: 400 - RNA, 20 nt, Artificial Sequence
  synthetic polynucleotide
gaaaagugauucagugauuu

SEQ ID NO: 401 - RNA, 20 nt, Artificial Sequence
  synthetic polynucleotide
aaagugauucagugauuuca

SEQ ID NO: 402 - RNA, 20 nt, Artificial Sequence
  synthetic polynucleotide
acuacugaaaaccuuuaaag

SEQ ID NO: 403 - RNA, 20 nt, Artificial Sequence
  synthetic polynucleotide
uacugaaaaccuuuaaaggg

SEQ ID NO: 404 - RNA, 20 nt, Artificial Sequence
  synthetic polynucleotide
uguauaacucuaagaucuga

SEQ ID NO: 405 - RNA, 20 nt, Artificial Sequence
  synthetic polynucleotide
uauaacucuaagaucugaug

SEQ ID NO: 406 - RNA, 20 nt, Artificial Sequence
  synthetic polynucleotide
auaacucuaagaucugauga

SEQ ID NO: 407 - RNA, 20 nt, Artificial Sequence
  synthetic polynucleotide
uaacucuaagaucugaugaa

SEQ ID NO: 408 - RNA, 20 nt, Artificial Sequence
  synthetic polynucleotide
aacucuaagaucugaugaag

SEQ ID NO: 409 - RNA, 20 nt, Artificial Sequence
  synthetic polynucleotide
acucuaagaucugaugaagu

SEQ ID NO: 410 - RNA, 20 nt, Artificial Sequence
  synthetic polynucleotide
gauuggcccggaaggguuca

SEQ ID NO: 411 - RNA, 20 nt, Artificial Sequence
  synthetic polynucleotide
ccuuugggcucggggccaaa

SEQ ID NO: 412 - RNA, 20 nt, Artificial Sequence
  synthetic polynucleotide
uugggcucggggccaaaggc

SEQ ID NO: 413 - RNA, 20 nt, Artificial Sequence
  synthetic polynucleotide
cgcaccuucccccagcggcc

SEQ ID NO: 414 - RNA, 20 nt, Artificial Sequence
  synthetic polynucleotide
ccgccgccaccucgcggaga

SEQ ID NO: 415 - RNA, 20 nt, Artificial Sequence
  synthetic polynucleotide
uccgcgcuggcgcgcuuugu

SEQ ID NO: 416 - RNA, 20 nt, Artificial Sequence
  synthetic polynucleotide
ccgcgcuggcgcgcuuuguc

SEQ ID NO: 417 - RNA, 20 nt, Artificial Sequence
  synthetic polynucleotide
cgcgcuggcgcgcuuugucc

SEQ ID NO: 418 - RNA, 20 nt, Artificial Sequence
  synthetic polynucleotide
cgcgcuuuguccuccucgcg

SEQ ID NO: 419 - RNA, 20 nt, Artificial Sequence
  synthetic polynucleotide
gcgcuuuguccuccucgcgc

SEQ ID NO: 420 - RNA, 20 nt, Artificial Sequence
  synthetic polynucleotide
cgcuuuguccuccucgcgca

SEQ ID NO: 421 - RNA, 20 nt, Artificial Sequence
  synthetic polynucleotide
gcuuuguccuccucgcgcaa

SEQ ID NO: 422 - RNA, 20 nt, Artificial Sequence
  synthetic polynucleotide
cuuuguccuccucgcgcaau

SEQ ID NO: 423 - RNA, 20 nt, Artificial Sequence
  synthetic polynucleotide
uuuguccuccucgcgcaauc

SEQ ID NO: 424 - RNA, 20 nt, Artificial Sequence
  synthetic polynucleotide
uguccuccucgcgcaauccc

SEQ ID NO: 425 - RNA, 20 nt, Artificial Sequence
  synthetic polynucleotide
guccuccucgcgcaaucccg

SEQ ID NO: 426 - RNA, 20 nt, Artificial Sequence
  synthetic polynucleotide
uccuccucgcgcaaucccgg

SEQ ID NO: 427 - RNA, 20 nt, Artificial Sequence
  synthetic polynucleotide
ccuccucgcgcaaucccggc

SEQ ID NO: 428 - RNA, 20 nt, Artificial Sequence
  synthetic polynucleotide
cucgcgcaaucccggcccgg

SEQ ID NO: 429 - RNA, 20 nt, Artificial Sequence
  synthetic polynucleotide
gcgcaaucccggcccgggug

SEQ ID NO: 430 - RNA, 20 nt, Artificial Sequence
  synthetic polynucleotide
cgcaaucccggcccgggugg

SEQ ID NO: 431 - RNA, 20 nt, Artificial Sequence
  synthetic polynucleotide
gcaaucccggcccggguggc

SEQ ID NO: 432 - RNA, 20 nt, Artificial Sequence
  synthetic polynucleotide
ggcccggguggcucgggguu

SEQ ID NO: 433 - RNA, 20 nt, Artificial Sequence
  synthetic polynucleotide
gcccggguggcucgggguug

SEQ ID NO: 434 - RNA, 20 nt, Artificial Sequence
  synthetic polynucleotide
cccggguggcucgggguugc

SEQ ID NO: 435 - RNA, 20 nt, Artificial Sequence
  synthetic polynucleotide
ucgggguugccgcgcugggc

SEQ ID NO: 436 - RNA, 20 nt, Artificial Sequence
  synthetic polynucleotide
gguugccgcgcugggccuga

SEQ ID NO: 437 - RNA, 20 nt, Artificial Sequence
  synthetic polynucleotide
gccgcgcugggccugaccgc

SEQ ID NO: 438 - RNA, 20 nt, Artificial Sequence
  synthetic polynucleotide
gcgcugggccugaccgcggu

SEQ ID NO: 439 - RNA, 20 nt, Artificial Sequence
  synthetic polynucleotide
ugggccugaccgcgguggcg

SEQ ID NO: 440 - RNA, 20 nt, Artificial Sequence
  synthetic polynucleotide
gggccugaccgcgguggcgc

SEQ ID NO: 441 - RNA, 20 nt, Artificial Sequence
  synthetic polynucleotide
gagggaaacaugguuacugc

SEQ ID NO: 442 - RNA, 20 nt, Artificial Sequence
  synthetic polynucleotide
ggaaacaugguuacugcucg

SEQ ID NO: 443 - RNA, 20 nt, Artificial Sequence
  synthetic polynucleotide
gaaacaugguuacugcucgc

SEQ ID NO: 444 - RNA, 20 nt, Artificial Sequence
  synthetic polynucleotide
aaacaugguuacugcucgcc

SEQ ID NO: 445 - RNA, 20 nt, Artificial Sequence
  synthetic polynucleotide
aacaugguuacugcucgcca

SEQ ID NO: 446 - RNA, 20 nt, Artificial Sequence
  synthetic polynucleotide
acaugguuacugcucgccag

SEQ ID NO: 447 - RNA, 20 nt, Artificial Sequence
  synthetic polynucleotide
guuacugcucgccaggaacc

SEQ ID NO: 448 - RNA, 20 nt, Artificial Sequence
  synthetic polynucleotide
uucccugaccugcgauggug

SEQ ID NO: 449 - RNA, 20 nt, Artificial Sequence
  synthetic polynucleotide
accugcgauggugacacccu

SEQ ID NO: 450 - RNA, 20 nt, Artificial Sequence
  synthetic polynucleotide
gugcagccuacacaaaggac

SEQ ID NO: 451 - RNA, 20 nt, Artificial Sequence
  synthetic polynucleotide
ugcagccuacacaaaggacc

SEQ ID NO: 452 - RNA, 20 nt, Artificial Sequence
  synthetic polynucleotide
cagccuacacaaaggaccua

SEQ ID NO: 453 - RNA, 20 nt, Artificial Sequence
  synthetic polynucleotide
agccuacacaaaggaccuac

SEQ ID NO: 454 - RNA, 20 nt, Artificial Sequence
  synthetic polynucleotide
gccuacacaaaggaccuacu

SEQ ID NO: 455 - RNA, 20 nt, Artificial Sequence
  synthetic polynucleotide
ccuacacaaaggaccuacua

SEQ ID NO: 456 - RNA, 20 nt, Artificial Sequence
  synthetic polynucleotide
cuacacaaaggaccuacuac

SEQ ID NO: 457 - RNA, 20 nt, Artificial Sequence
  synthetic polynucleotide
cacaaaggaccuacuacugc

SEQ ID NO: 458 - RNA, 20 nt, Artificial Sequence
  synthetic polynucleotide
aggaccuacuacugccuauc

SEQ ID NO: 459 - RNA, 20 nt, Artificial Sequence
  synthetic polynucleotide
ggaccuacuacugccuauca

SEQ ID NO: 460 - RNA, 20 nt, Artificial Sequence
  synthetic polynucleotide
accuacuacugccuaucaaa

SEQ ID NO: 461 - RNA, 20 nt, Artificial Sequence
  synthetic polynucleotide
uacuacugccuaucaaaacg

SEQ ID NO: 462 - RNA, 20 nt, Artificial Sequence
  synthetic polynucleotide
cuacugccuaucaaaacgcc

SEQ ID NO: 463 - RNA, 20 nt, Artificial Sequence
  synthetic polynucleotide
gccuaucaaaacgcccacca

SEQ ID NO: 464 - RNA, 20 nt, Artificial Sequence
  synthetic polynucleotide
accacaaaugcagugcacaa

SEQ ID NO: 465 - RNA, 20 nt, Artificial Sequence
  synthetic polynucleotide
cacaaaugcagugcacaagu

SEQ ID NO: 466 - RNA, 20 nt, Artificial Sequence
  synthetic polynucleotide
caaaugcagugcacaagugc

SEQ ID NO: 467 - RNA, 20 nt, Artificial Sequence
  synthetic polynucleotide
augcagugcacaagugcaga

SEQ ID NO: 468 - RNA, 20 nt, Artificial Sequence
  synthetic polynucleotide
agugcacaagugcagagugc

SEQ ID NO: 469 - RNA, 20 nt, Artificial Sequence
  synthetic polynucleotide
acaagugcagagugcacggc

SEQ ID NO: 470 - RNA, 20 nt, Artificial Sequence
  synthetic polynucleotide
caagugcagagugcacggcc

SEQ ID NO: 471 - RNA, 20 nt, Artificial Sequence
  synthetic polynucleotide
ugcagagugcacggccugga

SEQ ID NO: 472 - RNA, 20 nt, Artificial Sequence
  synthetic polynucleotide
agagugcacggccuggagau

SEQ ID NO: 473 - RNA, 20 nt, Artificial Sequence
  synthetic polynucleotide
gagugcacggccuggagaua

SEQ ID NO: 474 - RNA, 20 nt, Artificial Sequence
  synthetic polynucleotide
uggagauagagggcagggac

SEQ ID NO: 475 - RNA, 20 nt, Artificial Sequence
  synthetic polynucleotide
uccugaagucacagcccuac

SEQ ID NO: 476 - RNA, 20 nt, Artificial Sequence
  synthetic polynucleotide
cugaagucacagcccuaccg

SEQ ID NO: 477 - RNA, 20 nt, Artificial Sequence
  synthetic polynucleotide
gaagucacagcccuaccgcc

SEQ ID NO: 478 - RNA, 20 nt, Artificial Sequence
  synthetic polynucleotide
ccucacaugcgaccgagacg

SEQ ID NO: 479 - RNA, 20 nt, Artificial Sequence
  synthetic polynucleotide
cucacaugcgaccgagacgu

SEQ ID NO: 480 - RNA, 20 nt, Artificial Sequence
  synthetic polynucleotide
ucacaugcgaccgagacguc

SEQ ID NO: 481 - RNA, 20 nt, Artificial Sequence
  synthetic polynucleotide
cacaugcgaccgagacgucc

SEQ ID NO: 482 - RNA, 20 nt, Artificial Sequence
  synthetic polynucleotide
acaugcgaccgagacguccu

SEQ ID NO: 483 - RNA, 20 nt, Artificial Sequence
  synthetic polynucleotide
ugcgaccgagacguccucau

SEQ ID NO: 484 - RNA, 20 nt, Artificial Sequence
  synthetic polynucleotide
gcgaccgagacguccucauc

SEQ ID NO: 485 - RNA, 20 nt, Artificial Sequence
  synthetic polynucleotide
ccgagacguccucaucaaau

SEQ ID NO: 486 - RNA, 20 nt, Artificial Sequence
  synthetic polynucleotide
cgagacguccucaucaaaua

SEQ ID NO: 487 - RNA, 20 nt, Artificial Sequence
  synthetic polynucleotide
agacguccucaucaaauagc

SEQ ID NO: 488 - RNA, 20 nt, Artificial Sequence
  synthetic polynucleotide
uccucaucaaauagcagacu

SEQ ID NO: 489 - RNA, 20 nt, Artificial Sequence
  synthetic polynucleotide
cucaucaaauagcagacuug

SEQ ID NO: 490 - RNA, 20 nt, Artificial Sequence
  synthetic polynucleotide
cagacaccagcccauucuug

SEQ ID NO: 491 - RNA, 20 nt, Artificial Sequence
  synthetic polynucleotide
agacaccagcccauucuuga

SEQ ID NO: 492 - RNA, 20 nt, Artificial Sequence
  synthetic polynucleotide
gacaccagcccauucuugau

SEQ ID NO: 493 - RNA, 20 nt, Artificial Sequence
  synthetic polynucleotide
cagcccauucuugauccuuu

SEQ ID NO: 494 - RNA, 20 nt, Artificial Sequence
  synthetic polynucleotide
ccauucuugauccuuucuga

SEQ ID NO: 495 - RNA, 20 nt, Artificial Sequence
  synthetic polynucleotide
gcagaggauucuugggauga

SEQ ID NO: 496 - RNA, 20 nt, Artificial Sequence
  synthetic polynucleotide
auucuugggaugagcuucuu

SEQ ID NO: 497 - RNA, 20 nt, Artificial Sequence
  synthetic polynucleotide
cuugggaugagcuucuuauu

SEQ ID NO: 498 - RNA, 20 nt, Artificial Sequence
  synthetic polynucleotide
gggaugagcuucuuauuggu

SEQ ID NO: 499 - RNA, 20 nt, Artificial Sequence
  synthetic polynucleotide
ggaugagcuucuuauuggug

SEQ ID NO: 500 - RNA, 20 nt, Artificial Sequence
  synthetic polynucleotide
guggaacugaaaagggugau

SEQ ID NO: 501 - RNA, 20 nt, Artificial Sequence
  synthetic polynucleotide
uggaacugaaaagggugaug

SEQ ID NO: 502 - RNA, 20 nt, Artificial Sequence
  synthetic polynucleotide
gaacugaaaagggugauggc

SEQ ID NO: 503 - RNA, 20 nt, Artificial Sequence
  synthetic polynucleotide
cugaaaagggugauggcuug

SEQ ID NO: 504 - RNA, 20 nt, Artificial Sequence
  synthetic polynucleotide
ugaaaagggugauggcuugu

SEQ ID NO: 505 - RNA, 20 nt, Artificial Sequence
  synthetic polynucleotide
gaaaagggugauggcuuguu

SEQ ID NO: 506 - RNA, 20 nt, Artificial Sequence
  synthetic polynucleotide
aaaagggugauggcuuguuc

SEQ ID NO: 507 - RNA, 20 nt, Artificial Sequence
  synthetic polynucleotide
guggacccagacaccggugu

SEQ ID NO: 508 - RNA, 20 nt, Artificial Sequence
  synthetic polynucleotide
uggacccagacaccgguguc

SEQ ID NO: 509 - RNA, 20 nt, Artificial Sequence
  synthetic polynucleotide
ggacccagacaccgguguca

SEQ ID NO: 510 - RNA, 20 nt, Artificial Sequence
  synthetic polynucleotide
acccagacaccggugucaug

SEQ ID NO: 511 - RNA, 20 nt, Artificial Sequence
  synthetic polynucleotide
ccagacaccggugucaugag

SEQ ID NO: 512 - RNA, 20 nt, Artificial Sequence
  synthetic polynucleotide
caccggugucaugagcagga

SEQ ID NO: 513 - RNA, 20 nt, Artificial Sequence
  synthetic polynucleotide
gucaugagcaggaaggaacc

SEQ ID NO: 514 - RNA, 20 nt, Artificial Sequence
  synthetic polynucleotide
augagcaggaaggaaccgcu

SEQ ID NO: 515 - RNA, 20 nt, Artificial Sequence
  synthetic polynucleotide
aggaaggaaccgcuggaaac

SEQ ID NO: 516 - RNA, 20 nt, Artificial Sequence
  synthetic polynucleotide
ggaaggaaccgcuggaaaca

SEQ ID NO: 517 - RNA, 20 nt, Artificial Sequence
  synthetic polynucleotide
gaaggaaccgcuggaaacac

SEQ ID NO: 518 - RNA, 20 nt, Artificial Sequence
  synthetic polynucleotide
cugggccaguaaugggaacc

SEQ ID NO: 519 - RNA, 20 nt, Artificial Sequence
  synthetic polynucleotide
gggccaguaaugggaaccgu

SEQ ID NO: 520 - RNA, 20 nt, Artificial Sequence
  synthetic polynucleotide
ggccaguaaugggaaccgua

SEQ ID NO: 521 - RNA, 20 nt, Artificial Sequence
  synthetic polynucleotide
gccaguaaugggaaccguau

SEQ ID NO: 522 - RNA, 20 nt, Artificial Sequence
  synthetic polynucleotide
ccaguaaugggaaccguaug

SEQ ID NO: 523 - RNA, 20 nt, Artificial Sequence
  synthetic polynucleotide
caguaaugggaaccguaugu

SEQ ID NO: 524 - RNA, 20 nt, Artificial Sequence
  synthetic polynucleotide
aguaaugggaaccguauguc

SEQ ID NO: 525 - RNA, 20 nt, Artificial Sequence
  synthetic polynucleotide
ugggaaccguauguccugga

SEQ ID NO: 526 - RNA, 20 nt, Artificial Sequence
  synthetic polynucleotide
ggaaccguauguccuggaau

SEQ ID NO: 527 - RNA, 20 nt, Artificial Sequence
  synthetic polynucleotide
gaauauuagaugccuuuuaa

SEQ ID NO: 528 - RNA, 20 nt, Artificial Sequence
  synthetic polynucleotide
gaugccuuuuaaaaauguuc

SEQ ID NO: 529 - RNA, 20 nt, Artificial Sequence
  synthetic polynucleotide
guuucagaacugagaccucu

SEQ ID NO: 530 - RNA, 20 nt, Artificial Sequence
  synthetic polynucleotide
ucagaacugagaccucuaca

SEQ ID NO: 531 - RNA, 20 nt, Artificial Sequence
  synthetic polynucleotide
acugagaccucuacauuuuc

SEQ ID NO: 532 - RNA, 20 nt, Artificial Sequence
  synthetic polynucleotide
cugagaccucuacauuuucu

SEQ ID NO: 533 - RNA, 20 nt, Artificial Sequence
  synthetic polynucleotide
ugagaccucuacauuuucuu

SEQ ID NO: 534 - RNA, 20 nt, Artificial Sequence
  synthetic polynucleotide
ugauuuucacauuuuucguc

SEQ ID NO: 535 - RNA, 20 nt, Artificial Sequence
  synthetic polynucleotide
gauuuucacauuuuucgucu

SEQ ID NO: 536 - RNA, 20 nt, Artificial Sequence
  synthetic polynucleotide
auuuucacauuuuucgucuu

SEQ ID NO: 537 - RNA, 20 nt, Artificial Sequence
  synthetic polynucleotide
uuucacauuuuucgucuuuu

SEQ ID NO: 538 - RNA, 20 nt, Artificial Sequence
  synthetic polynucleotide
uucacauuuuucgucuuuug

SEQ ID NO: 539 - RNA, 20 nt, Artificial Sequence
  synthetic polynucleotide
ucacauuuuucgucuuuugg

SEQ ID NO: 540 - RNA, 20 nt, Artificial Sequence
  synthetic polynucleotide
acauuuuucgucuuuuggac

SEQ ID NO: 541 - RNA, 20 nt, Artificial Sequence
  synthetic polynucleotide
uuuucgucuuuuggacuucu

SEQ ID NO: 542 - RNA, 20 nt, Artificial Sequence
  synthetic polynucleotide
uuucgucuuuuggacuucug

SEQ ID NO: 543 - RNA, 20 nt, Artificial Sequence
  synthetic polynucleotide
uucgucuuuuggacuucugg

SEQ ID NO: 544 - RNA, 20 nt, Artificial Sequence
  synthetic polynucleotide
ucgucuuuuggacuucuggu

SEQ ID NO: 545 - RNA, 20 nt, Artificial Sequence
  synthetic polynucleotide
cuuuuggacuucuggugucu

SEQ ID NO: 546 - RNA, 20 nt, Artificial Sequence
  synthetic polynucleotide
uuggacuucuggugucucaa

SEQ ID NO: 547 - RNA, 20 nt, Artificial Sequence
  synthetic polynucleotide
ggacuucuggugucucaaug

SEQ ID NO: 548 - RNA, 20 nt, Artificial Sequence
  synthetic polynucleotide
gacuucuggugucucaaugc

SEQ ID NO: 549 - RNA, 20 nt, Artificial Sequence
  synthetic polynucleotide
uucuggugucucaaugcuuc

SEQ ID NO: 550 - RNA, 20 nt, Artificial Sequence
  synthetic polynucleotide
gcuucaaugucccagugcaa

SEQ ID NO: 551 - RNA, 20 nt, Artificial Sequence
  synthetic polynucleotide
augucccagugcaaaaagua

SEQ ID NO: 552 - RNA, 20 nt, Artificial Sequence
  synthetic polynucleotide
ugucccagugcaaaaaguaa

SEQ ID NO: 553 - RNA, 20 nt, Artificial Sequence
  synthetic polynucleotide
gucccagugcaaaaaguaaa

SEQ ID NO: 554 - RNA, 20 nt, Artificial Sequence
  synthetic polynucleotide
ucccagugcaaaaaguaaag

SEQ ID NO: 555 - RNA, 20 nt, Artificial Sequence
  synthetic polynucleotide
agugcaaaaaguaaagaaau

SEQ ID NO: 556 - RNA, 20 nt, Artificial Sequence
  synthetic polynucleotide
aagaaauauagucucaauaa

SEQ ID NO: 557 - RNA, 20 nt, Artificial Sequence
  synthetic polynucleotide
aaauauagucucaauaacuu

SEQ ID NO: 558 - RNA, 20 nt, Artificial Sequence
  synthetic polynucleotide
auauagucucaauaacuuag

SEQ ID NO: 559 - RNA, 20 nt, Artificial Sequence
  synthetic polynucleotide
uauagucucaauaacuuagu

SEQ ID NO: 560 - RNA, 20 nt, Artificial Sequence
  synthetic polynucleotide
auagucucaauaacuuagua

SEQ ID NO: 561 - RNA, 20 nt, Artificial Sequence
  synthetic polynucleotide
uagucucaauaacuuaguag

SEQ ID NO: 562 - RNA, 20 nt, Artificial Sequence
  synthetic polynucleotide
agucucaauaacuuaguagg

SEQ ID NO: 563 - RNA, 20 nt, Artificial Sequence
  synthetic polynucleotide
ucaauaacuuaguaggacuu

SEQ ID NO: 564 - RNA, 20 nt, Artificial Sequence
  synthetic polynucleotide
caauaacuuaguaggacuuc

SEQ ID NO: 565 - RNA, 20 nt, Artificial Sequence
  synthetic polynucleotide
auaacuuaguaggacuucag

SEQ ID NO: 566 - RNA, 20 nt, Artificial Sequence
  synthetic polynucleotide
aacuuaguaggacuucagua

SEQ ID NO: 567 - RNA, 20 nt, Artificial Sequence
  synthetic polynucleotide
acuuaguaggacuucaguaa

SEQ ID NO: 568 - RNA, 20 nt, Artificial Sequence
  synthetic polynucleotide
uuaguaggacuucaguaagu

SEQ ID NO: 569 - RNA, 20 nt, Artificial Sequence
  synthetic polynucleotide
uaguaggacuucaguaaguc

SEQ ID NO: 570 - RNA, 20 nt, Artificial Sequence
  synthetic polynucleotide
aguaggacuucaguaaguca

SEQ ID NO: 571 - RNA, 20 nt, Artificial Sequence
  synthetic polynucleotide
uaggacuucaguaagucacu

SEQ ID NO: 572 - RNA, 20 nt, Artificial Sequence
  synthetic polynucleotide
uaaaugacaagacaggauuc

SEQ ID NO: 573 - RNA, 20 nt, Artificial Sequence
  synthetic polynucleotide
ggauucugaaaacuccccgu

SEQ ID NO: 574 - RNA, 20 nt, Artificial Sequence
  synthetic polynucleotide
gauucugaaaacuccccguu

SEQ ID NO: 575 - RNA, 20 nt, Artificial Sequence
  synthetic polynucleotide
uucugaaaacuccccguuua

SEQ ID NO: 576 - RNA, 20 nt, Artificial Sequence
  synthetic polynucleotide
ucugaaaacuccccguuuaa

SEQ ID NO: 577 - RNA, 20 nt, Artificial Sequence
  synthetic polynucleotide
cugaaaacuccccguuuaac

SEQ ID NO: 578 - RNA, 20 nt, Artificial Sequence
  synthetic polynucleotide
ugaaaacuccccguuuaacu

SEQ ID NO: 579 - RNA, 20 nt, Artificial Sequence
  synthetic polynucleotide
aaaacuccccguuuaacuga

SEQ ID NO: 580 - RNA, 20 nt, Artificial Sequence
  synthetic polynucleotide
acuccccguuuaacugauua

SEQ ID NO: 581 - RNA, 20 nt, Artificial Sequence
  synthetic polynucleotide
cuccccguuuaacugauuau

SEQ ID NO: 582 - RNA, 20 nt, Artificial Sequence
  synthetic polynucleotide
uccccguuuaacugauuaug

SEQ ID NO: 583 - RNA, 20 nt, Artificial Sequence
  synthetic polynucleotide
ccccguuuaacugauuaugg

SEQ ID NO: 584 - RNA, 20 nt, Artificial Sequence
  synthetic polynucleotide
uucuccugcuucuccguuua

SEQ ID NO: 585 - RNA, 20 nt, Artificial Sequence
  synthetic polynucleotide
ucuccugcuucuccguuuau

SEQ ID NO: 586 - RNA, 20 nt, Artificial Sequence
  synthetic polynucleotide
cuccugcuucuccguuuauc

SEQ ID NO: 587 - RNA, 20 nt, Artificial Sequence
  synthetic polynucleotide
ccugcuucuccguuuaucua

SEQ ID NO: 588 - RNA, 20 nt, Artificial Sequence
  synthetic polynucleotide
gcuucuccguuuaucuacca

SEQ ID NO: 589 - RNA, 20 nt, Artificial Sequence
  synthetic polynucleotide
cuucuccguuuaucuaccaa

SEQ ID NO: 590 - RNA, 20 nt, Artificial Sequence
  synthetic polynucleotide
uucuccguuuaucuaccaag

SEQ ID NO: 591 - RNA, 20 nt, Artificial Sequence
  synthetic polynucleotide
ucuccguuuaucuaccaaga

SEQ ID NO: 592 - RNA, 20 nt, Artificial Sequence
  synthetic polynucleotide
cuccguuuaucuaccaagag

SEQ ID NO: 593 - RNA, 20 nt, Artificial Sequence
  synthetic polynucleotide
uccguuuaucuaccaagagc

SEQ ID NO: 594 - RNA, 20 nt, Artificial Sequence
  synthetic polynucleotide
cguuuaucuaccaagagcgc

SEQ ID NO: 595 - RNA, 20 nt, Artificial Sequence
  synthetic polynucleotide
uuaucuaccaagagcgcaga

SEQ ID NO: 596 - RNA, 20 nt, Artificial Sequence
  synthetic polynucleotide
aucuaccaagagcgcagacu

SEQ ID NO: 597 - RNA, 20 nt, Artificial Sequence
  synthetic polynucleotide
uaccaagagcgcagacuugc

SEQ ID NO: 598 - RNA, 20 nt, Artificial Sequence
  synthetic polynucleotide
accaagagcgcagacuugca

SEQ ID NO: 599 - RNA, 20 nt, Artificial Sequence
  synthetic polynucleotide
caagagcgcagacuugcauc

SEQ ID NO: 600 - RNA, 20 nt, Artificial Sequence
  synthetic polynucleotide
aagagcgcagacuugcaucc

SEQ ID NO: 601 - RNA, 20 nt, Artificial Sequence
  synthetic polynucleotide
gagcgcagacuugcauccug

SEQ ID NO: 602 - RNA, 20 nt, Artificial Sequence
  synthetic polynucleotide
gcgcagacuugcauccuguc

SEQ ID NO: 603 - RNA, 20 nt, Artificial Sequence
  synthetic polynucleotide
cgcagacuugcauccuguca

SEQ ID NO: 604 - RNA, 20 nt, Artificial Sequence
  synthetic polynucleotide
cagacuugcauccugucacu

SEQ ID NO: 605 - RNA, 20 nt, Artificial Sequence
  synthetic polynucleotide
cuugcauccugucacuacca

SEQ ID NO: 606 - RNA, 20 nt, Artificial Sequence
  synthetic polynucleotide
cauccugucacuaccacucg

SEQ ID NO: 607 - RNA, 20 nt, Artificial Sequence
  synthetic polynucleotide
uccugucacuaccacucguu

SEQ ID NO: 608 - RNA, 20 nt, Artificial Sequence
  synthetic polynucleotide
ccugucacuaccacucguua

SEQ ID NO: 609 - RNA, 20 nt, Artificial Sequence
  synthetic polynucleotide
cugucacuaccacucguuag

SEQ ID NO: 610 - RNA, 20 nt, Artificial Sequence
  synthetic polynucleotide
ugucacuaccacucguuaga

SEQ ID NO: 611 - RNA, 20 nt, Artificial Sequence
  synthetic polynucleotide
acuaccacucguuagagaaa

SEQ ID NO: 612 - RNA, 20 nt, Artificial Sequence
  synthetic polynucleotide
aagagugggugggcuggaag

SEQ ID NO: 613 - RNA, 20 nt, Artificial Sequence
  synthetic polynucleotide
uccuagaauguguuauugcc

SEQ ID NO: 614 - RNA, 20 nt, Artificial Sequence
  synthetic polynucleotide
ccuagaauguguuauugccc

SEQ ID NO: 615 - RNA, 20 nt, Artificial Sequence
  synthetic polynucleotide
aauguguuauugccccuguu

SEQ ID NO: 616 - RNA, 20 nt, Artificial Sequence
  synthetic polynucleotide
guguuauugccccuguucau

SEQ ID NO: 617 - RNA, 20 nt, Artificial Sequence
  synthetic polynucleotide
uuauugccccuguucaugag

SEQ ID NO: 618 - RNA, 20 nt, Artificial Sequence
  synthetic polynucleotide
auugccccuguucaugaggu

SEQ ID NO: 619 - RNA, 20 nt, Artificial Sequence
  synthetic polynucleotide
aaugaaaauuaaauugcacc

SEQ ID NO: 620 - RNA, 20 nt, Artificial Sequence
  synthetic polynucleotide
augaaaauuaaauugcaccc

SEQ ID NO: 621 - RNA, 20 nt, Artificial Sequence
  synthetic polynucleotide
aaauuaaauugcaccccaaa

SEQ ID NO: 622 - RNA, 20 nt, Artificial Sequence
  synthetic polynucleotide
auuaaauugcaccccaaaua

SEQ ID NO: 623 - RNA, 20 nt, Artificial Sequence
  synthetic polynucleotide
uuaaauugcaccccaaauau

SEQ ID NO: 624 - RNA, 20 nt, Artificial Sequence
  synthetic polynucleotide
aauugcaccccaaauauggc

SEQ ID NO: 625 - RNA, 20 nt, Artificial Sequence
  synthetic polynucleotide
auugcaccccaaauauggcu

SEQ ID NO: 626 - RNA, 20 nt, Artificial Sequence
  synthetic polynucleotide
auauggcuggaaugccacuu

SEQ ID NO: 627 - RNA, 20 nt, Artificial Sequence
  synthetic polynucleotide
uggaaugccacuucccuuuu

SEQ ID NO: 628 - RNA, 20 nt, Artificial Sequence
  synthetic polynucleotide
uucccuuuucuucucaagcc

SEQ ID NO: 629 - RNA, 20 nt, Artificial Sequence
  synthetic polynucleotide
ucuucucaagccccgggcua

SEQ ID NO: 630 - RNA, 20 nt, Artificial Sequence
  synthetic polynucleotide
ucucaagccccgggcuagcu

SEQ ID NO: 631 - RNA, 20 nt, Artificial Sequence
  synthetic polynucleotide
gcuuuugaaauggcauaaag

SEQ ID NO: 632 - RNA, 20 nt, Artificial Sequence
  synthetic polynucleotide
uuugaaauggcauaaagacu

SEQ ID NO: 633 - RNA, 20 nt, Artificial Sequence
  synthetic polynucleotide
aauggcauaaagacugaggu

SEQ ID NO: 634 - RNA, 20 nt, Artificial Sequence
  synthetic polynucleotide
uggcauaaagacugagguga

SEQ ID NO: 635 - RNA, 20 nt, Artificial Sequence
  synthetic polynucleotide
gcauaaagacugaggugacc

SEQ ID NO: 636 - RNA, 20 nt, Artificial Sequence
  synthetic polynucleotide
gaagcacugcagauauuaau

SEQ ID NO: 637 - RNA, 20 nt, Artificial Sequence
  synthetic polynucleotide
cuaaaggugcucaggaggau

SEQ ID NO: 638 - RNA, 20 nt, Artificial Sequence
  synthetic polynucleotide
aggugcucaggaggaugguu

SEQ ID NO: 639 - RNA, 20 nt, Artificial Sequence
  synthetic polynucleotide
gugcucaggaggaugguugu

SEQ ID NO: 640 - RNA, 20 nt, Artificial Sequence
  synthetic polynucleotide
gaggaugguuguguagucau

SEQ ID NO: 641 - RNA, 20 nt, Artificial Sequence
  synthetic polynucleotide
aggaugguuguguagucaug

SEQ ID NO: 642 - RNA, 20 nt, Artificial Sequence
  synthetic polynucleotide
ggaugguuguguagucaugg

SEQ ID NO: 643 - RNA, 20 nt, Artificial Sequence
  synthetic polynucleotide
uuguguagucauggaggacc

SEQ ID NO: 644 - RNA, 20 nt, Artificial Sequence
  synthetic polynucleotide
ucauggaggaccccuggauc

SEQ ID NO: 645 - RNA, 20 nt, Artificial Sequence
  synthetic polynucleotide
auuccccucagcuaaugacg

SEQ ID NO: 646 - RNA, 20 nt, Artificial Sequence
  synthetic polynucleotide
uuccccucagcuaaugacgg

SEQ ID NO: 647 - RNA, 20 nt, Artificial Sequence
  synthetic polynucleotide
uccccucagcuaaugacgga

SEQ ID NO: 648 - RNA, 20 nt, Artificial Sequence
  synthetic polynucleotide
ucagcuaaugacggagugcu

SEQ ID NO: 649 - RNA, 20 nt, Artificial Sequence
  synthetic polynucleotide
gaaaaaguucugaauucugu

SEQ ID NO: 650 - RNA, 20 nt, Artificial Sequence
  synthetic polynucleotide
aguucugaauucuguggagg

SEQ ID NO: 651 - RNA, 20 nt, Artificial Sequence
  synthetic polynucleotide
agugauuucagauagacuac

SEQ ID NO: 652 - RNA, 20 nt, Artificial Sequence
  synthetic polynucleotide
auuucagauagacuacugaa

SEQ ID NO: 653 - RNA, 20 nt, Artificial Sequence
  synthetic polynucleotide
cagauagacuacugaaaacc

SEQ ID NO: 654 - RNA, 20 nt, Artificial Sequence
  synthetic polynucleotide
uagacuacugaaaaccuuua

SEQ ID NO: 655 - RNA, 20 nt, Artificial Sequence
  synthetic polynucleotide
agacuacugaaaaccuuuaa

SEQ ID NO: 656 - RNA, 20 nt, Artificial Sequence
  synthetic polynucleotide
aaggaaagcauaugucaguu

SEQ ID NO: 657 - RNA, 20 nt, Artificial Sequence
  synthetic polynucleotide
aggaaagcauaugucaguug

SEQ ID NO: 658 - RNA, 20 nt, Artificial Sequence
  synthetic polynucleotide
ggaaagcauaugucaguugu

SEQ ID NO: 659 - RNA, 20 nt, Artificial Sequence
  synthetic polynucleotide
aaagcauaugucaguuguuu

SEQ ID NO: 660 - RNA, 20 nt, Artificial Sequence
  synthetic polynucleotide
aagcauaugucaguuguuua

SEQ ID NO: 661 - RNA, 20 nt, Artificial Sequence
  synthetic polynucleotide
agcauaugucaguuguuuaa

SEQ ID NO: 662 - RNA, 20 nt, Artificial Sequence
  synthetic polynucleotide
uaaaacccaauaucuauuuu

SEQ ID NO: 663 - RNA, 20 nt, Artificial Sequence
  synthetic polynucleotide
aacccaauaucuauuuuuua

SEQ ID NO: 664 - RNA, 20 nt, Artificial Sequence
  synthetic polynucleotide
uuaacugauuguauaacucu

SEQ ID NO: 665 - RNA, 20 nt, Artificial Sequence
  synthetic polynucleotide
uaacugauuguauaacucua

SEQ ID NO: 666 - RNA, 20 nt, Artificial Sequence
  synthetic polynucleotide
acugauuguauaacucuaag

SEQ ID NO: 667 - RNA, 20 nt, Artificial Sequence
  synthetic polynucleotide
cugauuguauaacucuaaga

SEQ ID NO: 668 - RNA, 20 nt, Artificial Sequence
  synthetic polynucleotide
gauuguauaacucuaagauc

SEQ ID NO: 669 - RNA, 20 nt, Artificial Sequence
  synthetic polynucleotide
gccauuuuguccuuugauua

SEQ ID NO: 670 - RNA, 20 nt, Artificial Sequence
  synthetic polynucleotide
uguccuuugauuauauuggg

SEQ ID NO: 671 - RNA, 21 nt, Artificial Sequence
  synthetic polynucleotide
uuccauauagugcuugcucgg

SEQ ID NO: 672 - RNA, 21 nt, Artificial Sequence
  synthetic polynucleotide
ucauuugccgagaacuucugg

SEQ ID NO: 673 - RNA, 21 nt, Artificial Sequence
  synthetic polynucleotide
uuccaaauucagcuugcucgg

SEQ ID NO: 674 - RNA, 21 nt, Artificial Sequence
  synthetic polynucleotide
ucauuagcgcugaacuucugg

SEQ ID NO: 675 - RNA, 23 nt, Artificial Sequence
  synthetic polynucleotide
aaucagagcagugcguccuucuu

SEQ ID NO: 676 - RNA, 23 nt, Artificial Sequence
  synthetic polynucleotide
acaaucagagcagugcguccuuu

SEQ ID NO: 677 - RNA, 23 nt, Artificial Sequence
  synthetic polynucleotide
accaaucagagcagugcguccuu

SEQ ID NO: 678 - RNA, 23 nt, Artificial Sequence
  synthetic polynucleotide
aggccaaucagagcagugcguuu

SEQ ID NO: 679 - RNA, 23 nt, Artificial Sequence
  synthetic polynucleotide
auuccgggccaaucagagcaguu

SEQ ID NO: 680 - RNA, 23 nt, Artificial Sequence
  synthetic polynucleotide
acuuccgggccaaucagagcauu

SEQ ID NO: 681 - RNA, 23 nt, Artificial Sequence
  synthetic polynucleotide
accuuccgggccaaucagagcuu

SEQ ID NO: 682 - RNA, 23 nt, Artificial Sequence
  synthetic polynucleotide
aaggugcggccuuuggccccguu

SEQ ID NO: 683 - RNA, 23 nt, Artificial Sequence
  synthetic polynucleotide
aaaggugcggccuuuggccccuu

SEQ ID NO: 684 - RNA, 23 nt, Artificial Sequence
  synthetic polynucleotide
agggaaggugcggccuuuggcuu

SEQ ID NO: 685 - RNA, 23 nt, Artificial Sequence
  synthetic polynucleotide
aggggaaggugcggccuuugguu

SEQ ID NO: 686 - RNA, 23 nt, Artificial Sequence
  synthetic polynucleotide
uggcuucuccgcgagguggcguu

SEQ ID NO: 687 - RNA, 23 nt, Artificial Sequence
  synthetic polynucleotide
auggcuucuccgcgagguggcuu

SEQ ID NO: 688 - RNA, 23 nt, Artificial Sequence
  synthetic polynucleotide
acuggcuucuccgcgaggugguu

SEQ ID NO: 689 - RNA, 23 nt, Artificial Sequence
  synthetic polynucleotide
uggcuggcuucuccgcgagguuu

SEQ ID NO: 690 - RNA, 23 nt, Artificial Sequence
  synthetic polynucleotide
uguuucccuccugguugaucauu

SEQ ID NO: 691 - RNA, 23 nt, Artificial Sequence
  synthetic polynucleotide
aauguuucccuccugguugauuu

SEQ ID NO: 692 - RNA, 23 nt, Artificial Sequence
  synthetic polynucleotide
acauguuucccuccugguugauu

SEQ ID NO: 693 - RNA, 23 nt, Artificial Sequence
  synthetic polynucleotide
accauguuucccuccugguuguu

SEQ ID NO: 694 - RNA, 23 nt, Artificial Sequence
  synthetic polynucleotide
aaccauguuucccuccugguuuu

SEQ ID NO: 695 - RNA, 23 nt, Artificial Sequence
  synthetic polynucleotide
uaaccauguuucccuccugguuu

SEQ ID NO: 696 - RNA, 23 nt, Artificial Sequence
  synthetic polynucleotide
aggcgagguuccuggcgagcauu

SEQ ID NO: 697 - RNA, 23 nt, Artificial Sequence
  synthetic polynucleotide
acaggcgagguuccuggcgaguu

SEQ ID NO: 698 - RNA, 23 nt, Artificial Sequence
  synthetic polynucleotide
aucaggaccaggcgagguuccuu

SEQ ID NO: 699 - RNA, 23 nt, Artificial Sequence
  synthetic polynucleotide
aaaucaggaccaggcgagguuuu

SEQ ID NO: 700 - RNA, 23 nt, Artificial Sequence
  synthetic polynucleotide
aaaaucaggaccaggcgagguuu

SEQ ID NO: 701 - RNA, 23 nt, Artificial Sequence
  synthetic polynucleotide
agaaaucaggaccaggcgagguu

SEQ ID NO: 702 - RNA, 23 nt, Artificial Sequence
  synthetic polynucleotide
aggaaaucaggaccaggcgaguu

SEQ ID NO: 703 - RNA, 23 nt, Artificial Sequence
  synthetic polynucleotide
aucagggaaaucaggaccagguu

SEQ ID NO: 704 - RNA, 23 nt, Artificial Sequence
  synthetic polynucleotide
auguaggcugcacugagagucuu

SEQ ID NO: 705 - RNA, 23 nt, Artificial Sequence
  synthetic polynucleotide
uuguguaggcugcacugagaguu

SEQ ID NO: 706 - RNA, 23 nt, Artificial Sequence
  synthetic polynucleotide
uuuguguaggcugcacugagauu

SEQ ID NO: 707 - RNA, 23 nt, Artificial Sequence
  synthetic polynucleotide
auuuguguaggcugcacugaguu

SEQ ID NO: 708 - RNA, 23 nt, Artificial Sequence
  synthetic polynucleotide
acuuuguguaggcugcacugauu

SEQ ID NO: 709 - RNA, 23 nt, Artificial Sequence
  synthetic polynucleotide
uuguggugggcguuuugauaguu

SEQ ID NO: 710 - RNA, 23 nt, Artificial Sequence
  synthetic polynucleotide
uuuguggugggcguuuugauauu

SEQ ID NO: 711 - RNA, 23 nt, Artificial Sequence
  synthetic polynucleotide
auuuguggugggcguuuugauuu

SEQ ID NO: 712 - RNA, 23 nt, Artificial Sequence
  synthetic polynucleotide
aauuuguggugggcguuuugauu

SEQ ID NO: 713 - RNA, 23 nt, Artificial Sequence
  synthetic polynucleotide
augcauuuguggugggcguuuuu

SEQ ID NO: 714 - RNA, 23 nt, Artificial Sequence
  synthetic polynucleotide
acugcauuuguggugggcguuuu

SEQ ID NO: 715 - RNA, 23 nt, Artificial Sequence
  synthetic polynucleotide
aggaagcugguuauccacugguu

SEQ ID NO: 716 - RNA, 23 nt, Artificial Sequence
  synthetic polynucleotide
aaggaagcugguuauccacuguu

SEQ ID NO: 717 - RNA, 23 nt, Artificial Sequence
  synthetic polynucleotide
uucaggaagcugguuauccacuu

SEQ ID NO: 718 - RNA, 23 nt, Artificial Sequence
  synthetic polynucleotide
aacuucaggaagcugguuaucuu

SEQ ID NO: 719 - RNA, 23 nt, Artificial Sequence
  synthetic polynucleotide
agaacaagucugcuauuugauuu

SEQ ID NO: 720 - RNA, 23 nt, Artificial Sequence
  synthetic polynucleotide
ucggaacaagucugcuauuuguu

SEQ ID NO: 721 - RNA, 23 nt, Artificial Sequence
  synthetic polynucleotide
aucggaacaagucugcuauuuuu

SEQ ID NO: 722 - RNA, 23 nt, Artificial Sequence
  synthetic polynucleotide
acgucaccaauaagaagcucauu

SEQ ID NO: 723 - RNA, 23 nt, Artificial Sequence
  synthetic polynucleotide
acacgucaccaauaagaagcuuu

SEQ ID NO: 724 - RNA, 23 nt, Artificial Sequence
  synthetic polynucleotide
uccacgucaccaauaagaagcuu

SEQ ID NO: 725 - RNA, 23 nt, Artificial Sequence
  synthetic polynucleotide
auuccacgucaccaauaagaauu

SEQ ID NO: 726 - RNA, 23 nt, Artificial Sequence
  synthetic polynucleotide
uuuucaguuccacgucaccaauu

SEQ ID NO: 727 - RNA, 23 nt, Artificial Sequence
  synthetic polynucleotide
auuuucaguuccacgucaccauu

SEQ ID NO: 728 - RNA, 23 nt, Artificial Sequence
  synthetic polynucleotide
acuuuucaguuccacgucaccuu

SEQ ID NO: 729 - RNA, 23 nt, Artificial Sequence
  synthetic polynucleotide
accuuuucaguuccacgucacuu

SEQ ID NO: 730 - RNA, 23 nt, Artificial Sequence
  synthetic polynucleotide
uaaaaugcaucuggaacaagcuu

SEQ ID NO: 731 - RNA, 23 nt, Artificial Sequence
  synthetic polynucleotide
ugguuaaaaugcaucuggaacuu

SEQ ID NO: 732 - RNA, 23 nt, Artificial Sequence
  synthetic polynucleotide
augguuaaaaugcaucuggaauu

SEQ ID NO: 733 - RNA, 23 nt, Artificial Sequence
  synthetic polynucleotide
auccacugugguuaaaaugcauu

SEQ ID NO: 734 - RNA, 23 nt, Artificial Sequence
  synthetic polynucleotide
aguccacugugguuaaaaugcuu

SEQ ID NO: 735 - RNA, 23 nt, Artificial Sequence
  synthetic polynucleotide
uuccuuccugcucaugacaccuu

SEQ ID NO: 736 - RNA, 23 nt, Artificial Sequence
  synthetic polynucleotide
auucaguguuuccagcgguucuu

SEQ ID NO: 737 - RNA, 23 nt, Artificial Sequence
  synthetic polynucleotide
uaacucuucaguguuuccagcuu

SEQ ID NO: 738 - RNA, 23 nt, Artificial Sequence
  synthetic polynucleotide
agauaacucuucaguguuuccuu

SEQ ID NO: 739 - RNA, 23 nt, Artificial Sequence
  synthetic polynucleotide
acgauaacucuucaguguuucuu

SEQ ID NO: 740 - RNA, 23 nt, Artificial Sequence
  synthetic polynucleotide
agcgauaacucuucaguguuuuu

SEQ ID NO: 741 - RNA, 23 nt, Artificial Sequence
  synthetic polynucleotide
uggcgauaacucuucaguguuuu

SEQ ID NO: 742 - RNA, 23 nt, Artificial Sequence
  synthetic polynucleotide
auggcgauaacucuucaguguuu

SEQ ID NO: 743 - RNA, 23 nt, Artificial Sequence
  synthetic polynucleotide
acuggcgauaacucuucaguguu

SEQ ID NO: 744 - RNA, 23 nt, Artificial Sequence
  synthetic polynucleotide
aacuggcgauaacucuucaguuu

SEQ ID NO: 745 - RNA, 23 nt, Artificial Sequence
  synthetic polynucleotide
acacuggcgauaacucuucaguu

SEQ ID NO: 746 - RNA, 23 nt, Artificial Sequence
  synthetic polynucleotide
aacacuggcgauaacucuucauu

SEQ ID NO: 747 - RNA, 23 nt, Artificial Sequence
  synthetic polynucleotide
ucacacuggcgauaacucuucuu

SEQ ID NO: 748 - RNA, 23 nt, Artificial Sequence
  synthetic polynucleotide
aggucacacuggcgauaacucuu

SEQ ID NO: 749 - RNA, 23 nt, Artificial Sequence
  synthetic polynucleotide
agggucacacuggcgauaacuuu

SEQ ID NO: 750 - RNA, 23 nt, Artificial Sequence
  synthetic polynucleotide
aagggucacacuggcgauaacuu

SEQ ID NO: 751 - RNA, 23 nt, Artificial Sequence
  synthetic polynucleotide
aaagggucacacuggcgauaauu

SEQ ID NO: 752 - RNA, 23 nt, Artificial Sequence
  synthetic polynucleotide
uucugaagggucacacuggcguu

SEQ ID NO: 753 - RNA, 23 nt, Artificial Sequence
  synthetic polynucleotide
auucugaagggucacacuggcuu

SEQ ID NO: 754 - RNA, 23 nt, Artificial Sequence
  synthetic polynucleotide
ucguucugaagggucacacuguu

SEQ ID NO: 755 - RNA, 23 nt, Artificial Sequence
  synthetic polynucleotide
uucguucugaagggucacacuuu

SEQ ID NO: 756 - RNA, 23 nt, Artificial Sequence
  synthetic polynucleotide
uuucguucugaagggucacacuu

SEQ ID NO: 757 - RNA, 23 nt, Artificial Sequence
  synthetic polynucleotide
auuucguucugaagggucacauu

SEQ ID NO: 758 - RNA, 23 nt, Artificial Sequence
  synthetic polynucleotide
acuuucguucugaagggucacuu

SEQ ID NO: 759 - RNA, 23 nt, Artificial Sequence
  synthetic polynucleotide
aacuuucguucugaagggucauu

SEQ ID NO: 760 - RNA, 23 nt, Artificial Sequence
  synthetic polynucleotide
uaacuuucguucugaagggucuu

SEQ ID NO: 761 - RNA, 23 nt, Artificial Sequence
  synthetic polynucleotide
auaacuuucguucugaaggguuu

SEQ ID NO: 762 - RNA, 23 nt, Artificial Sequence
  synthetic polynucleotide
uauaacuuucguucugaaggguu

SEQ ID NO: 763 - RNA, 23 nt, Artificial Sequence
  synthetic polynucleotide
auauaacuuucguucugaagguu

SEQ ID NO: 764 - RNA, 23 nt, Artificial Sequence
  synthetic polynucleotide
aauauaacuuucguucugaaguu

SEQ ID NO: 765 - RNA, 23 nt, Artificial Sequence
  synthetic polynucleotide
acauauaacuuucguucugaauu

SEQ ID NO: 766 - RNA, 23 nt, Artificial Sequence
  synthetic polynucleotide
uccauauaacuuucguucugauu

SEQ ID NO: 767 - RNA, 23 nt, Artificial Sequence
  synthetic polynucleotide
uuccauauaacuuucguucuguu

SEQ ID NO: 768 - RNA, 23 nt, Artificial Sequence
  synthetic polynucleotide
auggugauuuuccauauaacuuu

SEQ ID NO: 769 - RNA, 23 nt, Artificial Sequence
  synthetic polynucleotide
aaguggugauuuuccauauaauu

SEQ ID NO: 770 - RNA, 23 nt, Artificial Sequence
  synthetic polynucleotide
agucggaacaagucugcuauuuu

SEQ ID NO: 771 - RNA, 23 nt, Artificial Sequence
  synthetic polynucleotide
aggucggaacaagucugcuauuu

SEQ ID NO: 772 - RNA, 23 nt, Artificial Sequence
  synthetic polynucleotide
ugggucggaacaagucugcuauu

SEQ ID NO: 773 - RNA, 23 nt, Artificial Sequence
  synthetic polynucleotide
uugggucggaacaagucugcuuu

SEQ ID NO: 774 - RNA, 23 nt, Artificial Sequence
  synthetic polynucleotide
auugggucggaacaagucugcuu

SEQ ID NO: 775 - RNA, 23 nt, Artificial Sequence
  synthetic polynucleotide
acuugggucggaacaagucuguu

SEQ ID NO: 776 - RNA, 23 nt, Artificial Sequence
  synthetic polynucleotide
uccuugggucggaacaagucuuu

SEQ ID NO: 777 - RNA, 23 nt, Artificial Sequence
  synthetic polynucleotide
auccuugggucggaacaagucuu

SEQ ID NO: 778 - RNA, 23 nt, Artificial Sequence
  synthetic polynucleotide
aguccuugggucggaacaaguuu

SEQ ID NO: 779 - RNA, 23 nt, Artificial Sequence
  synthetic polynucleotide
ugguccuugggucggaacaaguu

SEQ ID NO: 780 - RNA, 23 nt, Artificial Sequence
  synthetic polynucleotide
aaucugguccuugggucggaauu

SEQ ID NO: 781 - RNA, 23 nt, Artificial Sequence
  synthetic polynucleotide
ugaguaagcaaucugguccuuuu

SEQ ID NO: 782 - RNA, 23 nt, Artificial Sequence
  synthetic polynucleotide
aucugaguaagcaaucuggucuu

SEQ ID NO: 783 - RNA, 23 nt, Artificial Sequence
  synthetic polynucleotide
augucugaguaagcaaucugguu

SEQ ID NO: 784 - RNA, 23 nt, Artificial Sequence
  synthetic polynucleotide
agugucugaguaagcaaucuguu

SEQ ID NO: 785 - RNA, 23 nt, Artificial Sequence
  synthetic polynucleotide
uggugucugaguaagcaaucuuu

SEQ ID NO: 786 - RNA, 23 nt, Artificial Sequence
  synthetic polynucleotide
auggugucugaguaagcaaucuu

SEQ ID NO: 787 - RNA, 23 nt, Artificial Sequence
  synthetic polynucleotide
acuggugucugaguaagcaauuu

SEQ ID NO: 788 - RNA, 23 nt, Artificial Sequence
  synthetic polynucleotide
ugggcuggugucugaguaagcuu

SEQ ID NO: 789 - RNA, 23 nt, Artificial Sequence
  synthetic polynucleotide
aaugggcuggugucugaguaauu

SEQ ID NO: 790 - RNA, 23 nt, Artificial Sequence
  synthetic polynucleotide
auagccuggaguugagauccguu

SEQ ID NO: 791 - RNA, 23 nt, Artificial Sequence
  synthetic polynucleotide
ucuagccuggaguugagauccuu

SEQ ID NO: 792 - RNA, 23 nt, Artificial Sequence
  synthetic polynucleotide
aucuagccuggaguugagaucuu

SEQ ID NO: 793 - RNA, 23 nt, Artificial Sequence
  synthetic polynucleotide
ucucuagccuggaguugagauuu

SEQ ID NO: 794 - RNA, 23 nt, Artificial Sequence
  synthetic polynucleotide
uuucuucucuagccuggaguuuu

SEQ ID NO: 795 - RNA, 23 nt, Artificial Sequence
  synthetic polynucleotide
ugguugcuuuaacuuucuucuuu

SEQ ID NO: 796 - RNA, 23 nt, Artificial Sequence
  synthetic polynucleotide
uugguugcuuuaacuuucuucuu

SEQ ID NO: 797 - RNA, 23 nt, Artificial Sequence
  synthetic polynucleotide
auugguugcuuuaacuuucuuuu

SEQ ID NO: 798 - RNA, 23 nt, Artificial Sequence
  synthetic polynucleotide
aguugguugcuuuaacuuucuuu

SEQ ID NO: 799 - RNA, 23 nt, Artificial Sequence
  synthetic polynucleotide
aaguugguugcuuuaacuuucuu

SEQ ID NO: 800 - RNA, 23 nt, Artificial Sequence
  synthetic polynucleotide
aaaguugguugcuuuaacuuuuu

SEQ ID NO: 801 - RNA, 23 nt, Artificial Sequence
  synthetic polynucleotide
ugaaguugguugcuuuaacuuuu

SEQ ID NO: 802 - RNA, 23 nt, Artificial Sequence
  synthetic polynucleotide
augaaguugguugcuuuaacuuu

SEQ ID NO: 803 - RNA, 23 nt, Artificial Sequence
  synthetic polynucleotide
acugaaguugguugcuuuaacuu

SEQ ID NO: 804 - RNA, 23 nt, Artificial Sequence
  synthetic polynucleotide
aggccugaaguugguugcuuuuu

SEQ ID NO: 805 - RNA, 23 nt, Artificial Sequence
  synthetic polynucleotide
uugggccugaaguugguugcuuu

SEQ ID NO: 806 - RNA, 23 nt, Artificial Sequence
  synthetic polynucleotide
uauugggccugaaguugguuguu

SEQ ID NO: 807 - RNA, 23 nt, Artificial Sequence
  synthetic polynucleotide
auauugggccugaaguugguuuu

SEQ ID NO: 808 - RNA, 23 nt, Artificial Sequence
  synthetic polynucleotide
aaauauugggccugaaguugguu

SEQ ID NO: 809 - RNA, 23 nt, Artificial Sequence
  synthetic polynucleotide
acaauauugggccugaaguuguu

SEQ ID NO: 810 - RNA, 23 nt, Artificial Sequence
  synthetic polynucleotide
uuacaauauugggccugaaguuu

SEQ ID NO: 811 - RNA, 23 nt, Artificial Sequence
  synthetic polynucleotide
auuacaauauugggccugaaguu

SEQ ID NO: 812 - RNA, 23 nt, Artificial Sequence
  synthetic polynucleotide
aauuacaauauugggccugaauu

SEQ ID NO: 813 - RNA, 23 nt, Artificial Sequence
  synthetic polynucleotide
aaauuacaauauugggccugauu

SEQ ID NO: 814 - RNA, 23 nt, Artificial Sequence
  synthetic polynucleotide
ugaaauuacaauauugggccuuu

SEQ ID NO: 815 - RNA, 23 nt, Artificial Sequence
  synthetic polynucleotide
augaaauuacaauauugggccuu

SEQ ID NO: 816 - RNA, 23 nt, Artificial Sequence
  synthetic polynucleotide
aucaccaauaagaagcucaucuu

SEQ ID NO: 817 - RNA, 23 nt, Artificial Sequence
  synthetic polynucleotide
agucaccaauaagaagcucauuu

SEQ ID NO: 818 - RNA, 23 nt, Artificial Sequence
  synthetic polynucleotide
aagaguggugauuuuccauauuu

SEQ ID NO: 819 - RNA, 23 nt, Artificial Sequence
  synthetic polynucleotide
aaagaguggugauuuuccauauu

SEQ ID NO: 820 - RNA, 23 nt, Artificial Sequence
  synthetic polynucleotide
aaaagaguggugauuuuccauuu

SEQ ID NO: 821 - RNA, 23 nt, Artificial Sequence
  synthetic polynucleotide
acaaagaguggugauuuuccauu

SEQ ID NO: 822 - RNA, 23 nt, Artificial Sequence
  synthetic polynucleotide
aauggucccuggguuuuccaguu

SEQ ID NO: 823 - RNA, 23 nt, Artificial Sequence
  synthetic polynucleotide
uugauggucccuggguuuuccuu

SEQ ID NO: 824 - RNA, 23 nt, Artificial Sequence
  synthetic polynucleotide
uuugauggucccuggguuuucuu

SEQ ID NO: 825 - RNA, 23 nt, Artificial Sequence
  synthetic polynucleotide
accacuuugauggucccuggguu

SEQ ID NO: 826 - RNA, 23 nt, Artificial Sequence
  synthetic polynucleotide
ucccacuuugauggucccugguu

SEQ ID NO: 827 - RNA, 23 nt, Artificial Sequence
  synthetic polynucleotide
aucucccacuuugauggucccuu

SEQ ID NO: 828 - RNA, 23 nt, Artificial Sequence
  synthetic polynucleotide
agcagguacacagggucucccuu

SEQ ID NO: 829 - RNA, 23 nt, Artificial Sequence
  synthetic polynucleotide
aauuacuggcccagcagguacuu

SEQ ID NO: 830 - RNA, 23 nt, Artificial Sequence
  synthetic polynucleotide
auucccauuacuggcccagcauu

SEQ ID NO: 831 - RNA, 23 nt, Artificial Sequence
  synthetic polynucleotide
uugucauuuuugagaacauuuuu

SEQ ID NO: 832 - RNA, 23 nt, Artificial Sequence
  synthetic polynucleotide
auugucauuuuugagaacauuuu

SEQ ID NO: 833 - RNA, 23 nt, Artificial Sequence
  synthetic polynucleotide
ugcuucaaguguugucauuuuuu

SEQ ID NO: 834 - RNA, 23 nt, Artificial Sequence
  synthetic polynucleotide
augcuucaaguguugucauuuuu

SEQ ID NO: 835 - RNA, 23 nt, Artificial Sequence
  synthetic polynucleotide
aaugcuucaaguguugucauuuu

SEQ ID NO: 836 - RNA, 23 nt, Artificial Sequence
  synthetic polynucleotide
accaugcuucaaguguugucauu

SEQ ID NO: 837 - RNA, 23 nt, Artificial Sequence
  synthetic polynucleotide
aaccaugcuucaaguguugucuu

SEQ ID NO: 838 - RNA, 23 nt, Artificial Sequence
  synthetic polynucleotide
acaccaugcuucaaguguuguuu

SEQ ID NO: 839 - RNA, 23 nt, Artificial Sequence
  synthetic polynucleotide
ugaaacaccaugcuucaaguguu

SEQ ID NO: 840 - RNA, 23 nt, Artificial Sequence
  synthetic polynucleotide
ucugaaacaccaugcuucaaguu

SEQ ID NO: 841 - RNA, 23 nt, Artificial Sequence
  synthetic polynucleotide
auugaagcauugagacaccaguu

SEQ ID NO: 842 - RNA, 23 nt, Artificial Sequence
  synthetic polynucleotide
aauugaagcauugagacaccauu

SEQ ID NO: 843 - RNA, 23 nt, Artificial Sequence
  synthetic polynucleotide
acauugaagcauugagacaccuu

SEQ ID NO: 844 - RNA, 23 nt, Artificial Sequence
  synthetic polynucleotide
aacauugaagcauugagacacuu

SEQ ID NO: 845 - RNA, 23 nt, Artificial Sequence
  synthetic polynucleotide
agacauugaagcauugagacauu

SEQ ID NO: 846 - RNA, 23 nt, Artificial Sequence
  synthetic polynucleotide
ugggacauugaagcauugagauu

SEQ ID NO: 847 - RNA, 23 nt, Artificial Sequence
  synthetic polynucleotide
augggacauugaagcauugaguu

SEQ ID NO: 848 - RNA, 23 nt, Artificial Sequence
  synthetic polynucleotide
aacugggacauugaagcauuguu

SEQ ID NO: 849 - RNA, 23 nt, Artificial Sequence
  synthetic polynucleotide
ugcacugggacauugaagcauuu

SEQ ID NO: 850 - RNA, 23 nt, Artificial Sequence
  synthetic polynucleotide
uugcacugggacauugaagcauu

SEQ ID NO: 851 - RNA, 23 nt, Artificial Sequence
  synthetic polynucleotide
ucagaauccugucuugucauuuu

SEQ ID NO: 852 - RNA, 23 nt, Artificial Sequence
  synthetic polynucleotide
uucagaauccugucuugucauuu

SEQ ID NO: 853 - RNA, 23 nt, Artificial Sequence
  synthetic polynucleotide
uuuucagaauccugucuugucuu

SEQ ID NO: 854 - RNA, 23 nt, Artificial Sequence
  synthetic polynucleotide
aaguuuucagaauccugucuuuu

SEQ ID NO: 855 - RNA, 23 nt, Artificial Sequence
  synthetic polynucleotide
agggaguuuucagaauccuguuu

SEQ ID NO: 856 - RNA, 23 nt, Artificial Sequence
  synthetic polynucleotide
uuccauaaucaguuaaacggguu

SEQ ID NO: 857 - RNA, 23 nt, Artificial Sequence
  synthetic polynucleotide
acuauuccauaaucaguuaaauu

SEQ ID NO: 858 - RNA, 23 nt, Artificial Sequence
  synthetic polynucleotide
aacuauuccauaaucaguuaauu

SEQ ID NO: 859 - RNA, 23 nt, Artificial Sequence
  synthetic polynucleotide
agaacuauuccauaaucaguuuu

SEQ ID NO: 860 - RNA, 23 nt, Artificial Sequence
  synthetic polynucleotide
aagaacuauuccauaaucaguuu

SEQ ID NO: 861 - RNA, 23 nt, Artificial Sequence
  synthetic polynucleotide
aaagaacuauuccauaaucaguu

SEQ ID NO: 862 - RNA, 23 nt, Artificial Sequence
  synthetic polynucleotide
agaaagaacuauuccauaaucuu

SEQ ID NO: 863 - RNA, 23 nt, Artificial Sequence
  synthetic polynucleotide
aagaaagaacuauuccauaauuu

SEQ ID NO: 864 - RNA, 23 nt, Artificial Sequence
  synthetic polynucleotide
agugguagugacaggaugcaauu

SEQ ID NO: 865 - RNA, 23 nt, Artificial Sequence
  synthetic polynucleotide
auuccagccauauuugggguguu

SEQ ID NO: 866 - RNA, 23 nt, Artificial Sequence
  synthetic polynucleotide
acauuccagccauauuugggguu

SEQ ID NO: 867 - RNA, 23 nt, Artificial Sequence
  synthetic polynucleotide
aaagcuagcccggggcuugaguu

SEQ ID NO: 868 - RNA, 23 nt, Artificial Sequence
  synthetic polynucleotide
aaaagcuagcccggggcuugauu

SEQ ID NO: 869 - RNA, 23 nt, Artificial Sequence
  synthetic polynucleotide
ucaaaagcuagcccggggcuuuu

SEQ ID NO: 870 - RNA, 23 nt, Artificial Sequence
  synthetic polynucleotide
uucaaaagcuagcccggggcuuu

SEQ ID NO: 871 - RNA, 23 nt, Artificial Sequence
  synthetic polynucleotide
uuucaaaagcuagcccggggcuu

SEQ ID NO: 872 - RNA, 23 nt, Artificial Sequence
  synthetic polynucleotide
aauuucaaaagcuagcccggguu

SEQ ID NO: 873 - RNA, 23 nt, Artificial Sequence
  synthetic polynucleotide
augccauuucaaaagcuagccuu

SEQ ID NO: 874 - RNA, 23 nt, Artificial Sequence
  synthetic polynucleotide
aaaggucaccucagucuuuauuu

SEQ ID NO: 875 - RNA, 23 nt, Artificial Sequence
  synthetic polynucleotide
auggaaaauuaauaucugcaguu

SEQ ID NO: 876 - RNA, 23 nt, Artificial Sequence
  synthetic polynucleotide
aaucuauggaaaauuaauaucuu

SEQ ID NO: 877 - RNA, 23 nt, Artificial Sequence
  synthetic polynucleotide
agaucuauggaaaauuaauauuu

SEQ ID NO: 878 - RNA, 23 nt, Artificial Sequence
  synthetic polynucleotide
auccagaucuauggaaaauuauu

SEQ ID NO: 879 - RNA, 23 nt, Artificial Sequence
  synthetic polynucleotide
aauccagaucuauggaaaauuuu

SEQ ID NO: 880 - RNA, 23 nt, Artificial Sequence
  synthetic polynucleotide
agauccagaucuauggaaaauuu

SEQ ID NO: 881 - RNA, 23 nt, Artificial Sequence
  synthetic polynucleotide
acagauccagaucuauggaaauu

SEQ ID NO: 882 - RNA, 23 nt, Artificial Sequence
  synthetic polynucleotide
uccaaugcugucugagaagcauu

SEQ ID NO: 883 - RNA, 23 nt, Artificial Sequence
  synthetic polynucleotide
auccaaugcugucugagaagcuu

SEQ ID NO: 884 - RNA, 23 nt, Artificial Sequence
  synthetic polynucleotide
aggaaauccaaugcugucugauu

SEQ ID NO: 885 - RNA, 23 nt, Artificial Sequence
  synthetic polynucleotide
uaggaaauccaaugcugucuguu

SEQ ID NO: 886 - RNA, 23 nt, Artificial Sequence
  synthetic polynucleotide
uuaggaaauccaaugcugucuuu

SEQ ID NO: 887 - RNA, 23 nt, Artificial Sequence
  synthetic polynucleotide
acuccugagcaccuuuaggaauu

SEQ ID NO: 888 - RNA, 23 nt, Artificial Sequence
  synthetic polynucleotide
uggcaaggauccagggguccuuu

SEQ ID NO: 889 - RNA, 23 nt, Artificial Sequence
  synthetic polynucleotide
aggaauggcaaggauccaggguu

SEQ ID NO: 890 - RNA, 23 nt, Artificial Sequence
  synthetic polynucleotide
aggggaauggcaaggauccaguu

SEQ ID NO: 891 - RNA, 23 nt, Artificial Sequence
  synthetic polynucleotide
ugaggggaauggcaaggauccuu

SEQ ID NO: 892 - RNA, 23 nt, Artificial Sequence
  synthetic polynucleotide
augaggggaauggcaaggaucuu

SEQ ID NO: 893 - RNA, 23 nt, Artificial Sequence
  synthetic polynucleotide
uagcugaggggaauggcaagguu

SEQ ID NO: 894 - RNA, 23 nt, Artificial Sequence
  synthetic polynucleotide
uuagcugaggggaauggcaaguu

SEQ ID NO: 895 - RNA, 23 nt, Artificial Sequence
  synthetic polynucleotide
ucauuagcugaggggaauggcuu

SEQ ID NO: 896 - RNA, 23 nt, Artificial Sequence
  synthetic polynucleotide
agucauuagcugaggggaauguu

SEQ ID NO: 897 - RNA, 23 nt, Artificial Sequence
  synthetic polynucleotide
acuggagaaggagcacuccguuu

SEQ ID NO: 898 - RNA, 23 nt, Artificial Sequence
  synthetic polynucleotide
uuucccccuuuaaagguuuucuu

SEQ ID NO: 899 - RNA, 23 nt, Artificial Sequence
  synthetic polynucleotide
auuuuaaacaacugacauauguu

SEQ ID NO: 900 - RNA, 23 nt, Artificial Sequence
  synthetic polynucleotide
uauuggguuuuaaacaacugauu

SEQ ID NO: 901 - RNA, 23 nt, Artificial Sequence
  synthetic polynucleotide
aauauuggguuuuaaacaacuuu

SEQ ID NO: 902 - RNA, 23 nt, Artificial Sequence
  synthetic polynucleotide
aaaucagagcagugcguccuuuu

SEQ ID NO: 903 - RNA, 23 nt, Artificial Sequence
  synthetic polynucleotide
aaaaagcuagcccggggcuuguu

SEQ ID NO: 904 - RNA, 23 nt, Artificial Sequence
  synthetic polynucleotide
auuucaaaagcuagcccgggguu

SEQ ID NO: 905 - RNA, 23 nt, Artificial Sequence
  synthetic polynucleotide
uuccugaaggucaccucagucuu

SEQ ID NO: 906 - RNA, 23 nt, Artificial Sequence
  synthetic polynucleotide
aagaucuauggaaaauuaauauu

SEQ ID NO: 907 - RNA, 23 nt, Artificial Sequence
  synthetic polynucleotide
aagauccagaucuauggaaaauu

SEQ ID NO: 908 - RNA, 23 nt, Artificial Sequence
  synthetic polynucleotide
aaauccaaugcugucugagaauu

SEQ ID NO: 909 - RNA, 23 nt, Artificial Sequence
  synthetic polynucleotide
auccugagcaccuuuaggaaauu

SEQ ID NO: 910 - RNA, 23 nt, Artificial Sequence
  synthetic polynucleotide
agggaauggcaaggauccagguu

SEQ ID NO: 911 - RNA, 23 nt, Artificial Sequence
  synthetic polynucleotide
agcugaggggaauggcaaggauu

SEQ ID NO: 912 - RNA, 23 nt, Artificial Sequence
  synthetic polynucleotide
aucauuagcugaggggaaugguu

SEQ ID NO: 913 - RNA, 23 nt, Artificial Sequence
  synthetic polynucleotide
uuuucccccuuuaaagguuuuuu

SEQ ID NO: 914 - RNA, 23 nt, Artificial Sequence
  synthetic polynucleotide
uagauauuggguuuuaaacaauu

SEQ ID NO: 915 - RNA, 23 nt, Artificial Sequence
  synthetic polynucleotide
auacuucaucagaucuuagaguu

SEQ ID NO: 916 - RNA, 23 nt, Artificial Sequence
  synthetic polynucleotide
auauacuucaucagaucuuaguu

SEQ ID NO: 917 - RNA, 23 nt, Artificial Sequence
  synthetic polynucleotide
aauauacuucaucagaucuuauu

SEQ ID NO: 918 - RNA, 23 nt, Artificial Sequence
  synthetic polynucleotide
aaauauacuucaucagaucuuuu

SEQ ID NO: 919 - RNA, 23 nt, Artificial Sequence
  synthetic polynucleotide
aaauaaaaaauauacuucaucuu

SEQ ID NO: 920 - RNA, 23 nt, Artificial Sequence
  synthetic polynucleotide
aaggacaaaauggcaauaaaauu

SEQ ID NO: 921 - RNA, 23 nt, Artificial Sequence
  synthetic polynucleotide
aaaggacaaaauggcaauaaauu

SEQ ID NO: 922 - RNA, 23 nt, Artificial Sequence
  synthetic polynucleotide
aaaaggacaaaauggcaauaauu

SEQ ID NO: 923 - RNA, 23 nt, Artificial Sequence
  synthetic polynucleotide
aucaaaggacaaaauggcaauuu

SEQ ID NO: 924 - RNA, 23 nt, Artificial Sequence
  synthetic polynucleotide
auuuagucaacuucccaauauuu

SEQ ID NO: 925 - RNA, 23 nt, Artificial Sequence
  synthetic polynucleotide
ucaaguuuagucaacuucccauu

SEQ ID NO: 926 - RNA, 23 nt, Artificial Sequence
  synthetic polynucleotide
uucaaguuuagucaacuucccuu

SEQ ID NO: 927 - RNA, 23 nt, Artificial Sequence
  synthetic polynucleotide
uuucaaguuuagucaacuuccuu

SEQ ID NO: 928 - RNA, 23 nt, Artificial Sequence
  synthetic polynucleotide
uagcuuccauuuauucacaguuu

SEQ ID NO: 929 - RNA, 23 nt, Artificial Sequence
  synthetic polynucleotide
aaaguagcuuccauuuauucauu

SEQ ID NO: 930 - RNA, 23 nt, Artificial Sequence
  synthetic polynucleotide
agucaaaguagcuuccauuuauu

SEQ ID NO: 931 - RNA, 23 nt, Artificial Sequence
  synthetic polynucleotide
uagucaaaguagcuuccauuuuu

SEQ ID NO: 932 - RNA, 23 nt, Artificial Sequence
  synthetic polynucleotide
ugaaacuagucaaaguagcuuuu

SEQ ID NO: 933 - RNA, 23 nt, Artificial Sequence
  synthetic polynucleotide
augaaacuagucaaaguagcuuu

SEQ ID NO: 934 - RNA, 23 nt, Artificial Sequence
  synthetic polynucleotide
aaacuggagaaggagcacuccuu

SEQ ID NO: 935 - RNA, 23 nt, Artificial Sequence
  synthetic polynucleotide
acuuuucccccuuuaaagguuuu

SEQ ID NO: 936 - RNA, 23 nt, Artificial Sequence
  synthetic polynucleotide
uccuuuucccccuuuaaagguuu

SEQ ID NO: 937 - RNA, 23 nt, Artificial Sequence
  synthetic polynucleotide
ucaaaggacaaaauggcaauauu

SEQ ID NO: 938 - RNA, 23 nt, Artificial Sequence
  synthetic polynucleotide
uauucaaguuuagucaacuucuu

SEQ ID NO: 939 - RNA, 23 nt, Artificial Sequence
  synthetic polynucleotide
uauuucaaguuuagucaacuuuu

SEQ ID NO: 940 - RNA, 23 nt, Artificial Sequence
  synthetic polynucleotide
ucugaaacuagucaaaguagcuu

SEQ ID NO: 941 - RNA, 23 nt, Artificial Sequence
  synthetic polynucleotide
uguaggcugcacugagagucauu

SEQ ID NO: 942 - RNA, 23 nt, Artificial Sequence
  synthetic polynucleotide
aacugcauuuguggugggcguuu

SEQ ID NO: 943 - RNA, 23 nt, Artificial Sequence
  synthetic polynucleotide
agaagcugguuauccacuggguu

SEQ ID NO: 944 - RNA, 23 nt, Artificial Sequence
  synthetic polynucleotide
aaacaagucugcuauuugauguu

SEQ ID NO: 945 - RNA, 23 nt, Artificial Sequence
  synthetic polynucleotide
aggaacaagucugcuauuugauu

SEQ ID NO: 946 - RNA, 23 nt, Artificial Sequence
  synthetic polynucleotide
uuaacuuucuucucuagccuguu

SEQ ID NO: 947 - RNA, 23 nt, Artificial Sequence
  synthetic polynucleotide
uuuaacuuucuucucuagccuuu

SEQ ID NO: 948 - RNA, 23 nt, Artificial Sequence
  synthetic polynucleotide
aauauugggccugaaguugguuu

SEQ ID NO: 949 - RNA, 23 nt, Artificial Sequence
  synthetic polynucleotide
aacgucaccaauaagaagcucuu

SEQ ID NO: 950 - RNA, 23 nt, Artificial Sequence
  synthetic polynucleotide
uuccacgucaccaauaagaaguu

SEQ ID NO: 951 - RNA, 23 nt, Artificial Sequence
  synthetic polynucleotide
aguuccacgucaccaauaagauu

SEQ ID NO: 952 - RNA, 23 nt, Artificial Sequence
  synthetic polynucleotide
uuucaguuccacgucaccaauuu

SEQ ID NO: 953 - RNA, 23 nt, Artificial Sequence
  synthetic polynucleotide
uuaaaaugcaucuggaacaaguu

SEQ ID NO: 954 - RNA, 23 nt, Artificial Sequence
  synthetic polynucleotide
aguuaaaaugcaucuggaacauu

SEQ ID NO: 955 - RNA, 23 nt, Artificial Sequence
  synthetic polynucleotide
auaacucuucaguguuuccaguu

SEQ ID NO: 956 - RNA, 23 nt, Artificial Sequence
  synthetic polynucleotide
aauaacucuucaguguuuccauu

SEQ ID NO: 957 - RNA, 23 nt, Artificial Sequence
  synthetic polynucleotide
aucacacuggcgauaacucuuuu

SEQ ID NO: 958 - RNA, 23 nt, Artificial Sequence
  synthetic polynucleotide
agucacacuggcgauaacucuuu

SEQ ID NO: 959 - RNA, 23 nt, Artificial Sequence
  synthetic polynucleotide
aguggugauuuuccauauaacuu

SEQ ID NO: 960 - RNA, 23 nt, Artificial Sequence
  synthetic polynucleotide
agucccuggguuuuccagcacuu

SEQ ID NO: 961 - RNA, 23 nt, Artificial Sequence
  synthetic polynucleotide
uggucccuggguuuuccagcauu

SEQ ID NO: 962 - RNA, 23 nt, Artificial Sequence
  synthetic polynucleotide
auggucccuggguuuuccagcuu

SEQ ID NO: 963 - RNA, 23 nt, Artificial Sequence
  synthetic polynucleotide
auuugauggucccuggguuuuuu

SEQ ID NO: 964 - RNA, 23 nt, Artificial Sequence
  synthetic polynucleotide
acuuugauggucccuggguuuuu

SEQ ID NO: 965 - RNA, 23 nt, Artificial Sequence
  synthetic polynucleotide
aacuuugauggucccuggguuuu

SEQ ID NO: 966 - RNA, 23 nt, Artificial Sequence
  synthetic polynucleotide
acacuuugauggucccuggguuu

SEQ ID NO: 967 - RNA, 23 nt, Artificial Sequence
  synthetic polynucleotide
aagguacacagggucucccacuu

SEQ ID NO: 968 - RNA, 23 nt, Artificial Sequence
  synthetic polynucleotide
aguucccauuacuggcccagcuu

SEQ ID NO: 969 - RNA, 23 nt, Artificial Sequence
  synthetic polynucleotide
auucaaguguugucauuuuuguu

SEQ ID NO: 970 - RNA, 23 nt, Artificial Sequence
  synthetic polynucleotide
acaugcuucaaguguugucauuu

SEQ ID NO: 971 - RNA, 23 nt, Artificial Sequence
  synthetic polynucleotide
augaaacaccaugcuucaaguuu

SEQ ID NO: 972 - RNA, 23 nt, Artificial Sequence
  synthetic polynucleotide
aaaugugaaaaucacaaauuuuu

SEQ ID NO: 973 - RNA, 23 nt, Artificial Sequence
  synthetic polynucleotide
acacugggacauugaagcauuuu

SEQ ID NO: 974 - RNA, 23 nt, Artificial Sequence
  synthetic polynucleotide
aagaauccugucuugucauuuuu

SEQ ID NO: 975 - RNA, 23 nt, Artificial Sequence
  synthetic polynucleotide
agagaaagaacuauuccauaauu

SEQ ID NO: 976 - RNA, 23 nt, Artificial Sequence
  synthetic polynucleotide
aggagaaagaacuauuccauauu

SEQ ID NO: 977 - RNA, 23 nt, Artificial Sequence
  synthetic polynucleotide
aagcaggagaaagaacuauucuu

SEQ ID NO: 978 - RNA, 23 nt, Artificial Sequence
  synthetic polynucleotide
aaagcaggagaaagaacuauuuu

SEQ ID NO: 979 - RNA, 23 nt, Artificial Sequence
  synthetic polynucleotide
aagugguagugacaggaugcauu

SEQ ID NO: 980 - RNA, 23 nt, Artificial Sequence
  synthetic polynucleotide
agagugguagugacaggaugcuu

SEQ ID NO: 981 - RNA, 23 nt, Artificial Sequence
  synthetic polynucleotide
acauuucaaaagcuagcccgguu

SEQ ID NO: 982 - RNA, 23 nt, Artificial Sequence
  synthetic polynucleotide
accauuucaaaagcuagcccguu

SEQ ID NO: 983 - RNA, 23 nt, Artificial Sequence
  synthetic polynucleotide
acugaaggucaccucagucuuuu

SEQ ID NO: 984 - RNA, 23 nt, Artificial Sequence
  synthetic polynucleotide
agugcuuccugaaggucaccuuu

SEQ ID NO: 985 - RNA, 23 nt, Artificial Sequence
  synthetic polynucleotide
aggccagauccagaucuaugguu

SEQ ID NO: 986 - RNA, 23 nt, Artificial Sequence
  synthetic polynucleotide
ugagcaccuuuaggaaauccauu

SEQ ID NO: 987 - RNA, 23 nt, Artificial Sequence
  synthetic polynucleotide
acugagcaccuuuaggaaaucuu

SEQ ID NO: 988 - RNA, 23 nt, Artificial Sequence
  synthetic polynucleotide
uccuccugagcaccuuuaggauu

SEQ ID NO: 989 - RNA, 23 nt, Artificial Sequence
  synthetic polynucleotide
aaaggauccagggguccuccauu

SEQ ID NO: 990 - RNA, 23 nt, Artificial Sequence
  synthetic polynucleotide
acaaggauccagggguccuccuu

SEQ ID NO: 991 - RNA, 23 nt, Artificial Sequence
  synthetic polynucleotide
agcaaggauccagggguccucuu

SEQ ID NO: 992 - RNA, 23 nt, Artificial Sequence
  synthetic polynucleotide
aacuggagaaggagcacuccguu

SEQ ID NO: 993 - RNA, 23 nt, Artificial Sequence
  synthetic polynucleotide
aucagagcagugcguccuucuuu

SEQ ID NO: 994 - RNA, 23 nt, Artificial Sequence
  synthetic polynucleotide
acccuuccgggccaaucagaguu

SEQ ID NO: 995 - RNA, 23 nt, Artificial Sequence
  synthetic polynucleotide
aacccuuccgggccaaucagauu

SEQ ID NO: 996 - RNA, 23 nt, Artificial Sequence
  synthetic polynucleotide
aaacccuuccgggccaaucaguu

SEQ ID NO: 997 - RNA, 23 nt, Artificial Sequence
  synthetic polynucleotide
aggaaggugcggccuuuggccuu

SEQ ID NO: 998 - RNA, 23 nt, Artificial Sequence
  synthetic polynucleotide
auggcuggcuucuccgcgagguu

SEQ ID NO: 999 - RNA, 23 nt, Artificial Sequence
  synthetic polynucleotide
acgcccauggcuggcuucuccuu

SEQ ID NO: 1000 - RNA, 23 nt, Artificial Sequence
  synthetic polynucleotide
agcgcccauggcuggcuucucuu

SEQ ID NO: 1001 - RNA, 23 nt, Artificial Sequence
  synthetic polynucleotide
auguuucccuccugguugaucuu

SEQ ID NO: 1002 - RNA, 23 nt, Artificial Sequence
  synthetic polynucleotide
acgagguuccuggcgagcaguuu

SEQ ID NO: 1003 - RNA, 23 nt, Artificial Sequence
  synthetic polynucleotide
accaggcgagguuccuggcgauu

SEQ ID NO: 1004 - RNA, 23 nt, Artificial Sequence
  synthetic polynucleotide
agaccaggcgagguuccuggcuu

SEQ ID NO: 1005 - RNA, 23 nt, Artificial Sequence
  synthetic polynucleotide
aaucaggaccaggcgagguucuu

SEQ ID NO: 1006 - RNA, 23 nt, Artificial Sequence
  synthetic polynucleotide
ugagagucagggugucaccauuu

SEQ ID NO: 1007 - RNA, 23 nt, Artificial Sequence
  synthetic polynucleotide
augagagucagggugucaccauu

SEQ ID NO: 1008 - RNA, 23 nt, Artificial Sequence
  synthetic polynucleotide
ugcacugagagucagggugucuu

SEQ ID NO: 1009 - RNA, 23 nt, Artificial Sequence
  synthetic polynucleotide
agcugcacugagagucaggguuu

SEQ ID NO: 1010 - RNA, 23 nt, Artificial Sequence
  synthetic polynucleotide
agcugguuauccacugggcgguu

SEQ ID NO: 1011 - RNA, 23 nt, Artificial Sequence
  synthetic polynucleotide
agcucgaagugcaccaggcgguu

SEQ ID NO: 1012 - RNA, 23 nt, Artificial Sequence
  synthetic polynucleotide
aggcucgaagugcaccaggcguu

SEQ ID NO: 1013 - RNA, 23 nt, Artificial Sequence
  synthetic polynucleotide
aaggcucgaagugcaccaggcuu

SEQ ID NO: 1014 - RNA, 23 nt, Artificial Sequence
  synthetic polynucleotide
ugaggcucgaagugcaccagguu

SEQ ID NO: 1015 - RNA, 23 nt, Artificial Sequence
  synthetic polynucleotide
augaggcucgaagugcaccaguu

SEQ ID NO: 1016 - RNA, 23 nt, Artificial Sequence
  synthetic polynucleotide
ugugaggcucgaagugcaccauu

SEQ ID NO: 1017 - RNA, 23 nt, Artificial Sequence
  synthetic polynucleotide
augugaggcucgaagugcaccuu

SEQ ID NO: 1018 - RNA, 23 nt, Artificial Sequence
  synthetic polynucleotide
aaugugaggcucgaagugcacuu

SEQ ID NO: 1019 - RNA, 23 nt, Artificial Sequence
  synthetic polynucleotide
acaugugaggcucgaagugcauu

SEQ ID NO: 1020 - RNA, 23 nt, Artificial Sequence
  synthetic polynucleotide
agcaugugaggcucgaagugcuu

SEQ ID NO: 1021 - RNA, 23 nt, Artificial Sequence
  synthetic polynucleotide
ucgcaugugaggcucgaaguguu

SEQ ID NO: 1022 - RNA, 23 nt, Artificial Sequence
  synthetic polynucleotide
aucgcaugugaggcucgaaguuu

SEQ ID NO: 1023 - RNA, 23 nt, Artificial Sequence
  synthetic polynucleotide
agucgcaugugaggcucgaaguu

SEQ ID NO: 1024 - RNA, 23 nt, Artificial Sequence
  synthetic polynucleotide
aggucgcaugugaggcucgaauu

SEQ ID NO: 1025 - RNA, 23 nt, Artificial Sequence
  synthetic polynucleotide
ucggucgcaugugaggcucgauu

SEQ ID NO: 1026 - RNA, 23 nt, Artificial Sequence
  synthetic polynucleotide
aucggucgcaugugaggcucguu

SEQ ID NO: 1027 - RNA, 23 nt, Artificial Sequence
  synthetic polynucleotide
agucucggucgcaugugaggcuu

SEQ ID NO: 1028 - RNA, 23 nt, Artificial Sequence
  synthetic polynucleotide
aacgccucagaaaggaucaaguu

SEQ ID NO: 1029 - RNA, 23 nt, Artificial Sequence
  synthetic polynucleotide
acuggaguugagauccgccaguu

SEQ ID NO: 1030 - RNA, 23 nt, Artificial Sequence
  synthetic polynucleotide
accuggaguugagauccgccauu

SEQ ID NO: 1031 - RNA, 23 nt, Artificial Sequence
  synthetic polynucleotide
aauccucugcauagacaucgcuu

SEQ ID NO: 1032 - RNA, 23 nt, Artificial Sequence
  synthetic polynucleotide
agaauccucugcauagacaucuu

SEQ ID NO: 1033 - RNA, 23 nt, Artificial Sequence
  synthetic polynucleotide
aaagaauccucugcauagacauu

SEQ ID NO: 1034 - RNA, 23 nt, Artificial Sequence
  synthetic polynucleotide
acaagaauccucugcauagacuu

SEQ ID NO: 1035 - RNA, 23 nt, Artificial Sequence
  synthetic polynucleotide
accaagaauccucugcauagauu

SEQ ID NO: 1036 - RNA, 23 nt, Artificial Sequence
  synthetic polynucleotide
ucccaagaauccucugcauaguu

SEQ ID NO: 1037 - RNA, 23 nt, Artificial Sequence
  synthetic polynucleotide
aaucuggaacaagccaucaccuu

SEQ ID NO: 1038 - RNA, 23 nt, Artificial Sequence
  synthetic polynucleotide
acaucuggaacaagccaucacuu

SEQ ID NO: 1039 - RNA, 23 nt, Artificial Sequence
  synthetic polynucleotide
aaaugcaucuggaacaagccauu

SEQ ID NO: 1040 - RNA, 23 nt, Artificial Sequence
  synthetic polynucleotide
agguccacugugguuaaaauguu

SEQ ID NO: 1041 - RNA, 23 nt, Artificial Sequence
  synthetic polynucleotide
auggguccacugugguuaaaauu

SEQ ID NO: 1042 - RNA, 23 nt, Artificial Sequence
  synthetic polynucleotide
ucuggguccacugugguuaaauu

SEQ ID NO: 1043 - RNA, 23 nt, Artificial Sequence
  synthetic polynucleotide
aauacugcccaaagagugguguu

SEQ ID NO: 1044 - RNA, 23 nt, Artificial Sequence
  synthetic polynucleotide
aaauacugcccaaagagugguuu

SEQ ID NO: 1045 - RNA, 23 nt, Artificial Sequence
  synthetic polynucleotide
agcacaaaauacugcccaaaguu

SEQ ID NO: 1046 - RNA, 23 nt, Artificial Sequence
  synthetic polynucleotide
aagcacaaaauacugcccaaauu

SEQ ID NO: 1047 - RNA, 23 nt, Artificial Sequence
  synthetic polynucleotide
acagcacaaaauacugcccaauu

SEQ ID NO: 1048 - RNA, 23 nt, Artificial Sequence
  synthetic polynucleotide
uccagcacaaaauacugcccauu

SEQ ID NO: 1049 - RNA, 23 nt, Artificial Sequence
  synthetic polynucleotide
uuuccagcacaaaauacugccuu

SEQ ID NO: 1050 - RNA, 23 nt, Artificial Sequence
  synthetic polynucleotide
uggguuuuccagcacaaaauauu

SEQ ID NO: 1051 - RNA, 23 nt, Artificial Sequence
  synthetic polynucleotide
auggguuuuccagcacaaaauuu

SEQ ID NO: 1052 - RNA, 23 nt, Artificial Sequence
  synthetic polynucleotide
uaauauuccaggacauacgguuu

SEQ ID NO: 1053 - RNA, 23 nt, Artificial Sequence
  synthetic polynucleotide
auaauauuccaggacauacgguu

SEQ ID NO: 1054 - RNA, 23 nt, Artificial Sequence
  synthetic polynucleotide
aucuaauauuccaggacauacuu

SEQ ID NO: 1055 - RNA, 23 nt, Artificial Sequence
  synthetic polynucleotide
aaucuaauauuccaggacauauu

SEQ ID NO: 1056 - RNA, 23 nt, Artificial Sequence
  synthetic polynucleotide
acaucuaauauuccaggacauuu

SEQ ID NO: 1057 - RNA, 23 nt, Artificial Sequence
  synthetic polynucleotide
agcaucuaauauuccaggacauu

SEQ ID NO: 1058 - RNA, 23 nt, Artificial Sequence
  synthetic polynucleotide
aggcaucuaauauuccaggacuu

SEQ ID NO: 1059 - RNA, 23 nt, Artificial Sequence
  synthetic polynucleotide
aaggcaucuaauauuccaggauu

SEQ ID NO: 1060 - RNA, 23 nt, Artificial Sequence
  synthetic polynucleotide
aaaggcaucuaauauuccagguu

SEQ ID NO: 1061 - RNA, 23 nt, Artificial Sequence
  synthetic polynucleotide
aaaaggcaucuaauauuccaguu

SEQ ID NO: 1062 - RNA, 23 nt, Artificial Sequence
  synthetic polynucleotide
ucucaguucugaaacaccauguu

SEQ ID NO: 1063 - RNA, 23 nt, Artificial Sequence
  synthetic polynucleotide
aucucaguucugaaacaccauuu

SEQ ID NO: 1064 - RNA, 23 nt, Artificial Sequence
  synthetic polynucleotide
agucucaguucugaaacaccauu

SEQ ID NO: 1065 - RNA, 23 nt, Artificial Sequence
  synthetic polynucleotide
aggucucaguucugaaacaccuu

SEQ ID NO: 1066 - RNA, 23 nt, Artificial Sequence
  synthetic polynucleotide
ugaaucacuuuucuucuccucuu

SEQ ID NO: 1067 - RNA, 23 nt, Artificial Sequence
  synthetic polynucleotide
ucacugaaucacuuuucuucuuu

SEQ ID NO: 1068 - RNA, 23 nt, Artificial Sequence
  synthetic polynucleotide
aucacugaaucacuuuucuucuu

SEQ ID NO: 1069 - RNA, 23 nt, Artificial Sequence
  synthetic polynucleotide
aaaaucacugaaucacuuuucuu

SEQ ID NO: 1070 - RNA, 23 nt, Artificial Sequence
  synthetic polynucleotide
augaaaucacugaaucacuuuuu

SEQ ID NO: 1071 - RNA, 23 nt, Artificial Sequence
  synthetic polynucleotide
acuuuaaagguuuucaguaguuu

SEQ ID NO: 1072 - RNA, 23 nt, Artificial Sequence
  synthetic polynucleotide
acccuuuaaagguuuucaguauu

SEQ ID NO: 1073 - RNA, 23 nt, Artificial Sequence
  synthetic polynucleotide
aucagaucuuagaguuauacauu

SEQ ID NO: 1074 - RNA, 23 nt, Artificial Sequence
  synthetic polynucleotide
ucaucagaucuuagaguuauauu

SEQ ID NO: 1075 - RNA, 23 nt, Artificial Sequence
  synthetic polynucleotide
uucaucagaucuuagaguuauuu

SEQ ID NO: 1076 - RNA, 23 nt, Artificial Sequence
  synthetic polynucleotide
auucaucagaucuuagaguuauu

SEQ ID NO: 1077 - RNA, 23 nt, Artificial Sequence
  synthetic polynucleotide
acuucaucagaucuuagaguuuu

SEQ ID NO: 1078 - RNA, 23 nt, Artificial Sequence
  synthetic polynucleotide
uacuucaucagaucuuagaguuu

SEQ ID NO: 1079 - RNA, 23 nt, Artificial Sequence
  synthetic polynucleotide
augaacccuuccgggccaaucuu

SEQ ID NO: 1080 - RNA, 23 nt, Artificial Sequence
  synthetic polynucleotide
auuuggccccgagcccaaagguu

SEQ ID NO: 1081 - RNA, 23 nt, Artificial Sequence
  synthetic polynucleotide
agccuuuggccccgagcccaauu

SEQ ID NO: 1082 - RNA, 23 nt, Artificial Sequence
  synthetic polynucleotide
aggccgcugggggaaggugcguu

SEQ ID NO: 1083 - RNA, 23 nt, Artificial Sequence
  synthetic polynucleotide
uucuccgcgagguggcggcgguu

SEQ ID NO: 1084 - RNA, 23 nt, Artificial Sequence
  synthetic polynucleotide
aacaaagcgcgccagcgcggauu

SEQ ID NO: 1085 - RNA, 23 nt, Artificial Sequence
  synthetic polynucleotide
agacaaagcgcgccagcgcgguu

SEQ ID NO: 1086 - RNA, 23 nt, Artificial Sequence
  synthetic polynucleotide
aggacaaagcgcgccagcgcguu

SEQ ID NO: 1087 - RNA, 23 nt, Artificial Sequence
  synthetic polynucleotide
acgcgaggaggacaaagcgcguu

SEQ ID NO: 1088 - RNA, 23 nt, Artificial Sequence
  synthetic polynucleotide
ugcgcgaggaggacaaagcgcuu

SEQ ID NO: 1089 - RNA, 23 nt, Artificial Sequence
  synthetic polynucleotide
uugcgcgaggaggacaaagcguu

SEQ ID NO: 1090 - RNA, 23 nt, Artificial Sequence
  synthetic polynucleotide
auugcgcgaggaggacaaagcuu

SEQ ID NO: 1091 - RNA, 23 nt, Artificial Sequence
  synthetic polynucleotide
aauugcgcgaggaggacaaaguu

SEQ ID NO: 1092 - RNA, 23 nt, Artificial Sequence
  synthetic polynucleotide
agauugcgcgaggaggacaaauu

SEQ ID NO: 1093 - RNA, 23 nt, Artificial Sequence
  synthetic polynucleotide
agggauugcgcgaggaggacauu

SEQ ID NO: 1094 - RNA, 23 nt, Artificial Sequence
  synthetic polynucleotide
acgggauugcgcgaggaggacuu

SEQ ID NO: 1095 - RNA, 23 nt, Artificial Sequence
  synthetic polynucleotide
accgggauugcgcgaggaggauu

SEQ ID NO: 1096 - RNA, 23 nt, Artificial Sequence
  synthetic polynucleotide
agccgggauugcgcgaggagguu

SEQ ID NO: 1097 - RNA, 23 nt, Artificial Sequence
  synthetic polynucleotide
accgggccgggauugcgcgaguu

SEQ ID NO: 1098 - RNA, 23 nt, Artificial Sequence
  synthetic polynucleotide
acacccgggccgggauugcgcuu

SEQ ID NO: 1099 - RNA, 23 nt, Artificial Sequence
  synthetic polynucleotide
accacccgggccgggauugcguu

SEQ ID NO: 1100 - RNA, 23 nt, Artificial Sequence
  synthetic polynucleotide
agccacccgggccgggauugcuu

SEQ ID NO: 1101 - RNA, 23 nt, Artificial Sequence
  synthetic polynucleotide
aaaccccgagccacccgggccuu

SEQ ID NO: 1102 - RNA, 23 nt, Artificial Sequence
  synthetic polynucleotide
acaaccccgagccacccgggcuu

SEQ ID NO: 1103 - RNA, 23 nt, Artificial Sequence
  synthetic polynucleotide
agcaaccccgagccacccggguu

SEQ ID NO: 1104 - RNA, 23 nt, Artificial Sequence
  synthetic polynucleotide
agcccagcgcggcaaccccgauu

SEQ ID NO: 1105 - RNA, 23 nt, Artificial Sequence
  synthetic polynucleotide
aucaggcccagcgcggcaaccuu

SEQ ID NO: 1106 - RNA, 23 nt, Artificial Sequence
  synthetic polynucleotide
agcggucaggcccagcgcggcuu

SEQ ID NO: 1107 - RNA, 23 nt, Artificial Sequence
  synthetic polynucleotide
aaccgcggucaggcccagcgcuu

SEQ ID NO: 1108 - RNA, 23 nt, Artificial Sequence
  synthetic polynucleotide
acgccaccgcggucaggcccauu

SEQ ID NO: 1109 - RNA, 23 nt, Artificial Sequence
  synthetic polynucleotide
agcgccaccgcggucaggcccuu

SEQ ID NO: 1110 - RNA, 23 nt, Artificial Sequence
  synthetic polynucleotide
agcaguaaccauguuucccucuu

SEQ ID NO: 1111 - RNA, 23 nt, Artificial Sequence
  synthetic polynucleotide
acgagcaguaaccauguuuccuu

SEQ ID NO: 1112 - RNA, 23 nt, Artificial Sequence
  synthetic polynucleotide
agcgagcaguaaccauguuucuu

SEQ ID NO: 1113 - RNA, 23 nt, Artificial Sequence
  synthetic polynucleotide
uggcgagcaguaaccauguuuuu

SEQ ID NO: 1114 - RNA, 23 nt, Artificial Sequence
  synthetic polynucleotide
auggcgagcaguaaccauguuuu

SEQ ID NO: 1115 - RNA, 23 nt, Artificial Sequence
  synthetic polynucleotide
acuggcgagcaguaaccauguuu

SEQ ID NO: 1116 - RNA, 23 nt, Artificial Sequence
  synthetic polynucleotide
agguuccuggcgagcaguaacuu

SEQ ID NO: 1117 - RNA, 23 nt, Artificial Sequence
  synthetic polynucleotide
ucaccaucgcaggucagggaauu

SEQ ID NO: 1118 - RNA, 23 nt, Artificial Sequence
  synthetic polynucleotide
aagggugucaccaucgcagguuu

SEQ ID NO: 1119 - RNA, 23 nt, Artificial Sequence
  synthetic polynucleotide
aguccuuuguguaggcugcacuu

SEQ ID NO: 1120 - RNA, 23 nt, Artificial Sequence
  synthetic polynucleotide
agguccuuuguguaggcugcauu

SEQ ID NO: 1121 - RNA, 23 nt, Artificial Sequence
  synthetic polynucleotide
auagguccuuuguguaggcuguu

SEQ ID NO: 1122 - RNA, 23 nt, Artificial Sequence
  synthetic polynucleotide
aguagguccuuuguguaggcuuu

SEQ ID NO: 1123 - RNA, 23 nt, Artificial Sequence
  synthetic polynucleotide
uaguagguccuuuguguaggcuu

SEQ ID NO: 1124 - RNA, 23 nt, Artificial Sequence
  synthetic polynucleotide
auaguagguccuuuguguagguu

SEQ ID NO: 1125 - RNA, 23 nt, Artificial Sequence
  synthetic polynucleotide
aguaguagguccuuuguguaguu

SEQ ID NO: 1126 - RNA, 23 nt, Artificial Sequence
  synthetic polynucleotide
agcaguaguagguccuuuguguu

SEQ ID NO: 1127 - RNA, 23 nt, Artificial Sequence
  synthetic polynucleotide
ugauaggcaguaguagguccuuu

SEQ ID NO: 1128 - RNA, 23 nt, Artificial Sequence
  synthetic polynucleotide
uugauaggcaguaguagguccuu

SEQ ID NO: 1129 - RNA, 23 nt, Artificial Sequence
  synthetic polynucleotide
uuuugauaggcaguaguagguuu

SEQ ID NO: 1130 - RNA, 23 nt, Artificial Sequence
  synthetic polynucleotide
acguuuugauaggcaguaguauu

SEQ ID NO: 1131 - RNA, 23 nt, Artificial Sequence
  synthetic polynucleotide
aggcguuuugauaggcaguaguu

SEQ ID NO: 1132 - RNA, 23 nt, Artificial Sequence
  synthetic polynucleotide
auggugggcguuuugauaggcuu

SEQ ID NO: 1133 - RNA, 23 nt, Artificial Sequence
  synthetic polynucleotide
auugugcacugcauuugugguuu

SEQ ID NO: 1134 - RNA, 23 nt, Artificial Sequence
  synthetic polynucleotide
aacuugugcacugcauuuguguu

SEQ ID NO: 1135 - RNA, 23 nt, Artificial Sequence
  synthetic polynucleotide
ugcacuugugcacugcauuuguu

SEQ ID NO: 1136 - RNA, 23 nt, Artificial Sequence
  synthetic polynucleotide
aucugcacuugugcacugcauuu

SEQ ID NO: 1137 - RNA, 23 nt, Artificial Sequence
  synthetic polynucleotide
ugcacucugcacuugugcacuuu

SEQ ID NO: 1138 - RNA, 23 nt, Artificial Sequence
  synthetic polynucleotide
agccgugcacucugcacuuguuu

SEQ ID NO: 1139 - RNA, 23 nt, Artificial Sequence
  synthetic polynucleotide
aggccgugcacucugcacuuguu

SEQ ID NO: 1140 - RNA, 23 nt, Artificial Sequence
  synthetic polynucleotide
auccaggccgugcacucugcauu

SEQ ID NO: 1141 - RNA, 23 nt, Artificial Sequence
  synthetic polynucleotide
uaucuccaggccgugcacucuuu

SEQ ID NO: 1142 - RNA, 23 nt, Artificial Sequence
  synthetic polynucleotide
auaucuccaggccgugcacucuu

SEQ ID NO: 1143 - RNA, 23 nt, Artificial Sequence
  synthetic polynucleotide
agucccugcccucuaucuccauu

SEQ ID NO: 1144 - RNA, 23 nt, Artificial Sequence
  synthetic polynucleotide
aguagggcugugacuucaggauu

SEQ ID NO: 1145 - RNA, 23 nt, Artificial Sequence
  synthetic polynucleotide
acgguagggcugugacuucaguu

SEQ ID NO: 1146 - RNA, 23 nt, Artificial Sequence
  synthetic polynucleotide
aggcgguagggcugugacuucuu

SEQ ID NO: 1147 - RNA, 23 nt, Artificial Sequence
  synthetic polynucleotide
acgucucggucgcaugugagguu

SEQ ID NO: 1148 - RNA, 23 nt, Artificial Sequence
  synthetic polynucleotide
aacgucucggucgcaugugaguu

SEQ ID NO: 1149 - RNA, 23 nt, Artificial Sequence
  synthetic polynucleotide
agacgucucggucgcaugugauu

SEQ ID NO: 1150 - RNA, 23 nt, Artificial Sequence
  synthetic polynucleotide
aggacgucucggucgcauguguu

SEQ ID NO: 1151 - RNA, 23 nt, Artificial Sequence
  synthetic polynucleotide
aaggacgucucggucgcauguuu

SEQ ID NO: 1152 - RNA, 23 nt, Artificial Sequence
  synthetic polynucleotide
aaugaggacgucucggucgcauu

SEQ ID NO: 1153 - RNA, 23 nt, Artificial Sequence
  synthetic polynucleotide
ugaugaggacgucucggucgcuu

SEQ ID NO: 1154 - RNA, 23 nt, Artificial Sequence
  synthetic polynucleotide
uauuugaugaggacgucucgguu

SEQ ID NO: 1155 - RNA, 23 nt, Artificial Sequence
  synthetic polynucleotide
auauuugaugaggacgucucguu

SEQ ID NO: 1156 - RNA, 23 nt, Artificial Sequence
  synthetic polynucleotide
ugcuauuugaugaggacgucuuu

SEQ ID NO: 1157 - RNA, 23 nt, Artificial Sequence
  synthetic polynucleotide
aagucugcuauuugaugaggauu

SEQ ID NO: 1158 - RNA, 23 nt, Artificial Sequence
  synthetic polynucleotide
acaagucugcuauuugaugaguu

SEQ ID NO: 1159 - RNA, 23 nt, Artificial Sequence
  synthetic polynucleotide
ucaagaaugggcuggugucuguu

SEQ ID NO: 1160 - RNA, 23 nt, Artificial Sequence
  synthetic polynucleotide
aucaagaaugggcuggugucuuu

SEQ ID NO: 1161 - RNA, 23 nt, Artificial Sequence
  synthetic polynucleotide
aaucaagaaugggcuggugucuu

SEQ ID NO: 1162 - RNA, 23 nt, Artificial Sequence
  synthetic polynucleotide
aaaaggaucaagaaugggcuguu

SEQ ID NO: 1163 - RNA, 23 nt, Artificial Sequence
  synthetic polynucleotide
aucagaaaggaucaagaaugguu

SEQ ID NO: 1164 - RNA, 23 nt, Artificial Sequence
  synthetic polynucleotide
aucaucccaagaauccucugcuu

SEQ ID NO: 1165 - RNA, 23 nt, Artificial Sequence
  synthetic polynucleotide
uaagaagcucaucccaagaauuu

SEQ ID NO: 1166 - RNA, 23 nt, Artificial Sequence
  synthetic polynucleotide
aaauaagaagcucaucccaaguu

SEQ ID NO: 1167 - RNA, 23 nt, Artificial Sequence
  synthetic polynucleotide
aaccaauaagaagcucaucccuu

SEQ ID NO: 1168 - RNA, 23 nt, Artificial Sequence
  synthetic polynucleotide
ucaccaauaagaagcucauccuu

SEQ ID NO: 1169 - RNA, 23 nt, Artificial Sequence
  synthetic polynucleotide
aaucacccuuuucaguuccacuu

SEQ ID NO: 1170 - RNA, 23 nt, Artificial Sequence
  synthetic polynucleotide
acaucacccuuuucaguuccauu

SEQ ID NO: 1171 - RNA, 23 nt, Artificial Sequence
  synthetic polynucleotide
agccaucacccuuuucaguucuu

SEQ ID NO: 1172 - RNA, 23 nt, Artificial Sequence
  synthetic polynucleotide
acaagccaucacccuuuucaguu

SEQ ID NO: 1173 - RNA, 23 nt, Artificial Sequence
  synthetic polynucleotide
aacaagccaucacccuuuucauu

SEQ ID NO: 1174 - RNA, 23 nt, Artificial Sequence
  synthetic polynucleotide
aaacaagccaucacccuuuucuu

SEQ ID NO: 1175 - RNA, 23 nt, Artificial Sequence
  synthetic polynucleotide
agaacaagccaucacccuuuuuu

SEQ ID NO: 1176 - RNA, 23 nt, Artificial Sequence
  synthetic polynucleotide
aacaccggugucuggguccacuu

SEQ ID NO: 1177 - RNA, 23 nt, Artificial Sequence
  synthetic polynucleotide
ugacaccggugucuggguccauu

SEQ ID NO: 1178 - RNA, 23 nt, Artificial Sequence
  synthetic polynucleotide
augacaccggugucuggguccuu

SEQ ID NO: 1179 - RNA, 23 nt, Artificial Sequence
  synthetic polynucleotide
ucaugacaccggugucuggguuu

SEQ ID NO: 1180 - RNA, 23 nt, Artificial Sequence
  synthetic polynucleotide
acucaugacaccggugucugguu

SEQ ID NO: 1181 - RNA, 23 nt, Artificial Sequence
  synthetic polynucleotide
uuccugcucaugacaccgguguu

SEQ ID NO: 1182 - RNA, 23 nt, Artificial Sequence
  synthetic polynucleotide
agguuccuuccugcucaugacuu

SEQ ID NO: 1183 - RNA, 23 nt, Artificial Sequence
  synthetic polynucleotide
aagcgguuccuuccugcucauuu

SEQ ID NO: 1184 - RNA, 23 nt, Artificial Sequence
  synthetic polynucleotide
uguuuccagcgguuccuuccuuu

SEQ ID NO: 1185 - RNA, 23 nt, Artificial Sequence
  synthetic polynucleotide
auguuuccagcgguuccuuccuu

SEQ ID NO: 1186 - RNA, 23 nt, Artificial Sequence
  synthetic polynucleotide
aguguuuccagcgguuccuucuu

SEQ ID NO: 1187 - RNA, 23 nt, Artificial Sequence
  synthetic polynucleotide
agguucccauuacuggcccaguu

SEQ ID NO: 1188 - RNA, 23 nt, Artificial Sequence
  synthetic polynucleotide
uacgguucccauuacuggcccuu

SEQ ID NO: 1189 - RNA, 23 nt, Artificial Sequence
  synthetic polynucleotide
auacgguucccauuacuggccuu

SEQ ID NO: 1190 - RNA, 23 nt, Artificial Sequence
  synthetic polynucleotide
aauacgguucccauuacuggcuu

SEQ ID NO: 1191 - RNA, 23 nt, Artificial Sequence
  synthetic polynucleotide
acauacgguucccauuacugguu

SEQ ID NO: 1192 - RNA, 23 nt, Artificial Sequence
  synthetic polynucleotide
aacauacgguucccauuacuguu

SEQ ID NO: 1193 - RNA, 23 nt, Artificial Sequence
  synthetic polynucleotide
agacauacgguucccauuacuuu

SEQ ID NO: 1194 - RNA, 23 nt, Artificial Sequence
  synthetic polynucleotide
uuccaggacauacgguucccauu

SEQ ID NO: 1195 - RNA, 23 nt, Artificial Sequence
  synthetic polynucleotide
uauuccaggacauacgguuccuu

SEQ ID NO: 1196 - RNA, 23 nt, Artificial Sequence
  synthetic polynucleotide
uuuaaaaggcaucuaauauucuu

SEQ ID NO: 1197 - RNA, 23 nt, Artificial Sequence
  synthetic polynucleotide
agaacauuuuuaaaaggcaucuu

SEQ ID NO: 1198 - RNA, 23 nt, Artificial Sequence
  synthetic polynucleotide
uagaggucucaguucugaaacuu

SEQ ID NO: 1199 - RNA, 23 nt, Artificial Sequence
  synthetic polynucleotide
auguagaggucucaguucugauu

SEQ ID NO: 1200 - RNA, 23 nt, Artificial Sequence
  synthetic polynucleotide
agaaaauguagaggucucaguuu

SEQ ID NO: 1201 - RNA, 23 nt, Artificial Sequence
  synthetic polynucleotide
aagaaaauguagaggucucaguu

SEQ ID NO: 1202 - RNA, 23 nt, Artificial Sequence
  synthetic polynucleotide
aaagaaaauguagaggucucauu

SEQ ID NO: 1203 - RNA, 23 nt, Artificial Sequence
  synthetic polynucleotide
agacgaaaaaugugaaaaucauu

SEQ ID NO: 1204 - RNA, 23 nt, Artificial Sequence
  synthetic polynucleotide
aagacgaaaaaugugaaaaucuu

SEQ ID NO: 1205 - RNA, 23 nt, Artificial Sequence
  synthetic polynucleotide
aaagacgaaaaaugugaaaauuu

SEQ ID NO: 1206 - RNA, 23 nt, Artificial Sequence
  synthetic polynucleotide
aaaaagacgaaaaaugugaaauu

SEQ ID NO: 1207 - RNA, 23 nt, Artificial Sequence
  synthetic polynucleotide
acaaaagacgaaaaaugugaauu

SEQ ID NO: 1208 - RNA, 23 nt, Artificial Sequence
  synthetic polynucleotide
uccaaaagacgaaaaaugugauu

SEQ ID NO: 1209 - RNA, 23 nt, Artificial Sequence
  synthetic polynucleotide
aguccaaaagacgaaaaauguuu

SEQ ID NO: 1210 - RNA, 23 nt, Artificial Sequence
  synthetic polynucleotide
aagaaguccaaaagacgaaaauu

SEQ ID NO: 1211 - RNA, 23 nt, Artificial Sequence
  synthetic polynucleotide
acagaaguccaaaagacgaaauu

SEQ ID NO: 1212 - RNA, 23 nt, Artificial Sequence
  synthetic polynucleotide
accagaaguccaaaagacgaauu

SEQ ID NO: 1213 - RNA, 23 nt, Artificial Sequence
  synthetic polynucleotide
aaccagaaguccaaaagacgauu

SEQ ID NO: 1214 - RNA, 23 nt, Artificial Sequence
  synthetic polynucleotide
aagacaccagaaguccaaaaguu

SEQ ID NO: 1215 - RNA, 23 nt, Artificial Sequence
  synthetic polynucleotide
auugagacaccagaaguccaauu

SEQ ID NO: 1216 - RNA, 23 nt, Artificial Sequence
  synthetic polynucleotide
acauugagacaccagaaguccuu

SEQ ID NO: 1217 - RNA, 23 nt, Artificial Sequence
  synthetic polynucleotide
agcauugagacaccagaagucuu

SEQ ID NO: 1218 - RNA, 23 nt, Artificial Sequence
  synthetic polynucleotide
ugaagcauugagacaccagaauu

SEQ ID NO: 1219 - RNA, 23 nt, Artificial Sequence
  synthetic polynucleotide
uuugcacugggacauugaagcuu

SEQ ID NO: 1220 - RNA, 23 nt, Artificial Sequence
  synthetic polynucleotide
uuacuuuuugcacugggacauuu

SEQ ID NO: 1221 - RNA, 23 nt, Artificial Sequence
  synthetic polynucleotide
uuuacuuuuugcacugggacauu

SEQ ID NO: 1222 - RNA, 23 nt, Artificial Sequence
  synthetic polynucleotide
auuuacuuuuugcacugggacuu

SEQ ID NO: 1223 - RNA, 23 nt, Artificial Sequence
  synthetic polynucleotide
ucuuuacuuuuugcacugggauu

SEQ ID NO: 1224 - RNA, 23 nt, Artificial Sequence
  synthetic polynucleotide
uauuucuuuacuuuuugcacuuu

SEQ ID NO: 1225 - RNA, 23 nt, Artificial Sequence
  synthetic polynucleotide
auuauugagacuauauuucuuuu

SEQ ID NO: 1226 - RNA, 23 nt, Artificial Sequence
  synthetic polynucleotide
uaaguuauugagacuauauuuuu

SEQ ID NO: 1227 - RNA, 23 nt, Artificial Sequence
  synthetic polynucleotide
acuaaguuauugagacuauauuu

SEQ ID NO: 1228 - RNA, 23 nt, Artificial Sequence
  synthetic polynucleotide
uacuaaguuauugagacuauauu

SEQ ID NO: 1229 - RNA, 23 nt, Artificial Sequence
  synthetic polynucleotide
auacuaaguuauugagacuauuu

SEQ ID NO: 1230 - RNA, 23 nt, Artificial Sequence
  synthetic polynucleotide
acuacuaaguuauugagacuauu

SEQ ID NO: 1231 - RNA, 23 nt, Artificial Sequence
  synthetic polynucleotide
uccuacuaaguuauugagacuuu

SEQ ID NO: 1232 - RNA, 23 nt, Artificial Sequence
  synthetic polynucleotide
aaaguccuacuaaguuauugauu

SEQ ID NO: 1233 - RNA, 23 nt, Artificial Sequence
  synthetic polynucleotide
ugaaguccuacuaaguuauuguu

SEQ ID NO: 1234 - RNA, 23 nt, Artificial Sequence
  synthetic polynucleotide
acugaaguccuacuaaguuauuu

SEQ ID NO: 1235 - RNA, 23 nt, Artificial Sequence
  synthetic polynucleotide
uuacugaaguccuacuaaguuuu

SEQ ID NO: 1236 - RNA, 23 nt, Artificial Sequence
  synthetic polynucleotide
auuacugaaguccuacuaaguuu

SEQ ID NO: 1237 - RNA, 23 nt, Artificial Sequence
  synthetic polynucleotide
aacuuacugaaguccuacuaauu

SEQ ID NO: 1238 - RNA, 23 nt, Artificial Sequence
  synthetic polynucleotide
ugacuuacugaaguccuacuauu

SEQ ID NO: 1239 - RNA, 23 nt, Artificial Sequence
  synthetic polynucleotide
augacuuacugaaguccuacuuu

SEQ ID NO: 1240 - RNA, 23 nt, Artificial Sequence
  synthetic polynucleotide
aagugacuuacugaaguccuauu

SEQ ID NO: 1241 - RNA, 23 nt, Artificial Sequence
  synthetic polynucleotide
agaauccugucuugucauuuauu

SEQ ID NO: 1242 - RNA, 23 nt, Artificial Sequence
  synthetic polynucleotide
aacggggaguuuucagaauccuu

SEQ ID NO: 1243 - RNA, 23 nt, Artificial Sequence
  synthetic polynucleotide
aaacggggaguuuucagaaucuu

SEQ ID NO: 1244 - RNA, 23 nt, Artificial Sequence
  synthetic polynucleotide
uuaaacggggaguuuucagaauu

SEQ ID NO: 1245 - RNA, 23 nt, Artificial Sequence
  synthetic polynucleotide
auuaaacggggaguuuucagauu

SEQ ID NO: 1246 - RNA, 23 nt, Artificial Sequence
  synthetic polynucleotide
aguuaaacggggaguuuucaguu

SEQ ID NO: 1247 - RNA, 23 nt, Artificial Sequence
  synthetic polynucleotide
aaguuaaacggggaguuuucauu

SEQ ID NO: 1248 - RNA, 23 nt, Artificial Sequence
  synthetic polynucleotide
aucaguuaaacggggaguuuuuu

SEQ ID NO: 1249 - RNA, 23 nt, Artificial Sequence
  synthetic polynucleotide
auaaucaguuaaacggggaguuu

SEQ ID NO: 1250 - RNA, 23 nt, Artificial Sequence
  synthetic polynucleotide
aauaaucaguuaaacggggaguu

SEQ ID NO: 1251 - RNA, 23 nt, Artificial Sequence
  synthetic polynucleotide
acauaaucaguuaaacggggauu

SEQ ID NO: 1252 - RNA, 23 nt, Artificial Sequence
  synthetic polynucleotide
uccauaaucaguuaaacgggguu

SEQ ID NO: 1253 - RNA, 23 nt, Artificial Sequence
  synthetic polynucleotide
auaaacggagaagcaggagaauu

SEQ ID NO: 1254 - RNA, 23 nt, Artificial Sequence
  synthetic polynucleotide
aauaaacggagaagcaggagauu

SEQ ID NO: 1255 - RNA, 23 nt, Artificial Sequence
  synthetic polynucleotide
agauaaacggagaagcaggaguu

SEQ ID NO: 1256 - RNA, 23 nt, Artificial Sequence
  synthetic polynucleotide
auagauaaacggagaagcagguu

SEQ ID NO: 1257 - RNA, 23 nt, Artificial Sequence
  synthetic polynucleotide
uugguagauaaacggagaagcuu

SEQ ID NO: 1258 - RNA, 23 nt, Artificial Sequence
  synthetic polynucleotide
auugguagauaaacggagaaguu

SEQ ID NO: 1259 - RNA, 23 nt, Artificial Sequence
  synthetic polynucleotide
ucuugguagauaaacggagaauu

SEQ ID NO: 1260 - RNA, 23 nt, Artificial Sequence
  synthetic polynucleotide
aucuugguagauaaacggagauu

SEQ ID NO: 1261 - RNA, 23 nt, Artificial Sequence
  synthetic polynucleotide
acucuugguagauaaacggaguu

SEQ ID NO: 1262 - RNA, 23 nt, Artificial Sequence
  synthetic polynucleotide
agcucuugguagauaaacggauu

SEQ ID NO: 1263 - RNA, 23 nt, Artificial Sequence
  synthetic polynucleotide
ugcgcucuugguagauaaacguu

SEQ ID NO: 1264 - RNA, 23 nt, Artificial Sequence
  synthetic polynucleotide
aucugcgcucuugguagauaauu

SEQ ID NO: 1265 - RNA, 23 nt, Artificial Sequence
  synthetic polynucleotide
aagucugcgcucuugguagauuu

SEQ ID NO: 1266 - RNA, 23 nt, Artificial Sequence
  synthetic polynucleotide
ugcaagucugcgcucuugguauu

SEQ ID NO: 1267 - RNA, 23 nt, Artificial Sequence
  synthetic polynucleotide
augcaagucugcgcucuugguuu

SEQ ID NO: 1268 - RNA, 23 nt, Artificial Sequence
  synthetic polynucleotide
agaugcaagucugcgcucuuguu

SEQ ID NO: 1269 - RNA, 23 nt, Artificial Sequence
  synthetic polynucleotide
aggaugcaagucugcgcucuuuu

SEQ ID NO: 1270 - RNA, 23 nt, Artificial Sequence
  synthetic polynucleotide
acaggaugcaagucugcgcucuu

SEQ ID NO: 1271 - RNA, 23 nt, Artificial Sequence
  synthetic polynucleotide
ugacaggaugcaagucugcgcuu

SEQ ID NO: 1272 - RNA, 23 nt, Artificial Sequence
  synthetic polynucleotide
augacaggaugcaagucugcguu

SEQ ID NO: 1273 - RNA, 23 nt, Artificial Sequence
  synthetic polynucleotide
uagugacaggaugcaagucuguu

SEQ ID NO: 1274 - RNA, 23 nt, Artificial Sequence
  synthetic polynucleotide
augguagugacaggaugcaaguu

SEQ ID NO: 1275 - RNA, 23 nt, Artificial Sequence
  synthetic polynucleotide
acgagugguagugacaggauguu

SEQ ID NO: 1276 - RNA, 23 nt, Artificial Sequence
  synthetic polynucleotide
uaacgagugguagugacaggauu

SEQ ID NO: 1277 - RNA, 23 nt, Artificial Sequence
  synthetic polynucleotide
auaacgagugguagugacagguu

SEQ ID NO: 1278 - RNA, 23 nt, Artificial Sequence
  synthetic polynucleotide
ucuaacgagugguagugacaguu

SEQ ID NO: 1279 - RNA, 23 nt, Artificial Sequence
  synthetic polynucleotide
aucuaacgagugguagugacauu

SEQ ID NO: 1280 - RNA, 23 nt, Artificial Sequence
  synthetic polynucleotide
auuucucuaacgagugguaguuu

SEQ ID NO: 1281 - RNA, 23 nt, Artificial Sequence
  synthetic polynucleotide
ucuuccagcccacccacucuuuu

SEQ ID NO: 1282 - RNA, 23 nt, Artificial Sequence
  synthetic polynucleotide
aggcaauaacacauucuaggauu

SEQ ID NO: 1283 - RNA, 23 nt, Artificial Sequence
  synthetic polynucleotide
agggcaauaacacauucuagguu

SEQ ID NO: 1284 - RNA, 23 nt, Artificial Sequence
  synthetic polynucleotide
aaacaggggcaauaacacauuuu

SEQ ID NO: 1285 - RNA, 23 nt, Artificial Sequence
  synthetic polynucleotide
aaugaacaggggcaauaacacuu

SEQ ID NO: 1286 - RNA, 23 nt, Artificial Sequence
  synthetic polynucleotide
acucaugaacaggggcaauaauu

SEQ ID NO: 1287 - RNA, 23 nt, Artificial Sequence
  synthetic polynucleotide
uaccucaugaacaggggcaauuu

SEQ ID NO: 1288 - RNA, 23 nt, Artificial Sequence
  synthetic polynucleotide
aggugcaauuuaauuuucauuuu

SEQ ID NO: 1289 - RNA, 23 nt, Artificial Sequence
  synthetic polynucleotide
agggugcaauuuaauuuucauuu

SEQ ID NO: 1290 - RNA, 23 nt, Artificial Sequence
  synthetic polynucleotide
auuuggggugcaauuuaauuuuu

SEQ ID NO: 1291 - RNA, 23 nt, Artificial Sequence
  synthetic polynucleotide
auauuuggggugcaauuuaauuu

SEQ ID NO: 1292 - RNA, 23 nt, Artificial Sequence
  synthetic polynucleotide
aauauuuggggugcaauuuaauu

SEQ ID NO: 1293 - RNA, 23 nt, Artificial Sequence
  synthetic polynucleotide
agccauauuuggggugcaauuuu

SEQ ID NO: 1294 - RNA, 23 nt, Artificial Sequence
  synthetic polynucleotide
aagccauauuuggggugcaauuu

SEQ ID NO: 1295 - RNA, 23 nt, Artificial Sequence
  synthetic polynucleotide
aaaguggcauuccagccauauuu

SEQ ID NO: 1296 - RNA, 23 nt, Artificial Sequence
  synthetic polynucleotide
aaaaagggaaguggcauuccauu

SEQ ID NO: 1297 - RNA, 23 nt, Artificial Sequence
  synthetic polynucleotide
aggcuugagaagaaaagggaauu

SEQ ID NO: 1298 - RNA, 23 nt, Artificial Sequence
  synthetic polynucleotide
auagcccggggcuugagaagauu

SEQ ID NO: 1299 - RNA, 23 nt, Artificial Sequence
  synthetic polynucleotide
aagcuagcccggggcuugagauu

SEQ ID NO: 1300 - RNA, 23 nt, Artificial Sequence
  synthetic polynucleotide
ucuuuaugccauuucaaaagcuu

SEQ ID NO: 1301 - RNA, 23 nt, Artificial Sequence
  synthetic polynucleotide
aagucuuuaugccauuucaaauu

SEQ ID NO: 1302 - RNA, 23 nt, Artificial Sequence
  synthetic polynucleotide
aaccucagucuuuaugccauuuu

SEQ ID NO: 1303 - RNA, 23 nt, Artificial Sequence
  synthetic polynucleotide
aucaccucagucuuuaugccauu

SEQ ID NO: 1304 - RNA, 23 nt, Artificial Sequence
  synthetic polynucleotide
aggucaccucagucuuuaugcuu

SEQ ID NO: 1305 - RNA, 23 nt, Artificial Sequence
  synthetic polynucleotide
aauuaauaucugcagugcuucuu

SEQ ID NO: 1306 - RNA, 23 nt, Artificial Sequence
  synthetic polynucleotide
aauccuccugagcaccuuuaguu

SEQ ID NO: 1307 - RNA, 23 nt, Artificial Sequence
  synthetic polynucleotide
aaaccauccuccugagcaccuuu

SEQ ID NO: 1308 - RNA, 23 nt, Artificial Sequence
  synthetic polynucleotide
aacaaccauccuccugagcacuu

SEQ ID NO: 1309 - RNA, 23 nt, Artificial Sequence
  synthetic polynucleotide
aaugacuacacaaccauccucuu

SEQ ID NO: 1310 - RNA, 23 nt, Artificial Sequence
  synthetic polynucleotide
acaugacuacacaaccauccuuu

SEQ ID NO: 1311 - RNA, 23 nt, Artificial Sequence
  synthetic polynucleotide
uccaugacuacacaaccauccuu

SEQ ID NO: 1312 - RNA, 23 nt, Artificial Sequence
  synthetic polynucleotide
agguccuccaugacuacacaauu

SEQ ID NO: 1313 - RNA, 23 nt, Artificial Sequence
  synthetic polynucleotide
agauccagggguccuccaugauu

SEQ ID NO: 1314 - RNA, 23 nt, Artificial Sequence
  synthetic polynucleotide
acgucauuagcugaggggaauuu

SEQ ID NO: 1315 - RNA, 23 nt, Artificial Sequence
  synthetic polynucleotide
uccgucauuagcugaggggaauu

SEQ ID NO: 1316 - RNA, 23 nt, Artificial Sequence
  synthetic polynucleotide
auccgucauuagcugaggggauu

SEQ ID NO: 1317 - RNA, 23 nt, Artificial Sequence
  synthetic polynucleotide
aagcacuccgucauuagcugauu

SEQ ID NO: 1318 - RNA, 23 nt, Artificial Sequence
  synthetic polynucleotide
aacagaauucagaacuuuuucuu

SEQ ID NO: 1319 - RNA, 23 nt, Artificial Sequence
  synthetic polynucleotide
uccuccacagaauucagaacuuu

SEQ ID NO: 1320 - RNA, 23 nt, Artificial Sequence
  synthetic polynucleotide
aguagucuaucugaaaucacuuu

SEQ ID NO: 1321 - RNA, 23 nt, Artificial Sequence
  synthetic polynucleotide
uuucaguagucuaucugaaauuu

SEQ ID NO: 1322 - RNA, 23 nt, Artificial Sequence
  synthetic polynucleotide
agguuuucaguagucuaucuguu

SEQ ID NO: 1323 - RNA, 23 nt, Artificial Sequence
  synthetic polynucleotide
uuaaagguuuucaguagucuauu

SEQ ID NO: 1324 - RNA, 23 nt, Artificial Sequence
  synthetic polynucleotide
uuuaaagguuuucaguagucuuu

SEQ ID NO: 1325 - RNA, 23 nt, Artificial Sequence
  synthetic polynucleotide
aaacugacauaugcuuuccuuuu

SEQ ID NO: 1326 - RNA, 23 nt, Artificial Sequence
  synthetic polynucleotide
acaacugacauaugcuuuccuuu

SEQ ID NO: 1327 - RNA, 23 nt, Artificial Sequence
  synthetic polynucleotide
aacaacugacauaugcuuuccuu

SEQ ID NO: 1328 - RNA, 23 nt, Artificial Sequence
  synthetic polynucleotide
uaaacaacugacauaugcuuuuu

SEQ ID NO: 1329 - RNA, 23 nt, Artificial Sequence
  synthetic polynucleotide
uuaaacaacugacauaugcuuuu

SEQ ID NO: 1330 - RNA, 23 nt, Artificial Sequence
  synthetic polynucleotide
uuuaaacaacugacauaugcuuu

SEQ ID NO: 1331 - RNA, 23 nt, Artificial Sequence
  synthetic polynucleotide
aaaaauagauauuggguuuuauu

SEQ ID NO: 1332 - RNA, 23 nt, Artificial Sequence
  synthetic polynucleotide
uuaaaaaauagauauuggguuuu

SEQ ID NO: 1333 - RNA, 23 nt, Artificial Sequence
  synthetic polynucleotide
uagaguuauacaaucaguuaauu

SEQ ID NO: 1334 - RNA, 23 nt, Artificial Sequence
  synthetic polynucleotide
uuagaguuauacaaucaguuauu

SEQ ID NO: 1335 - RNA, 23 nt, Artificial Sequence
  synthetic polynucleotide
ucuuagaguuauacaaucaguuu

SEQ ID NO: 1336 - RNA, 23 nt, Artificial Sequence
  synthetic polynucleotide
aucuuagaguuauacaaucaguu

SEQ ID NO: 1337 - RNA, 23 nt, Artificial Sequence
  synthetic polynucleotide
agaucuuagaguuauacaaucuu

SEQ ID NO: 1338 - RNA, 23 nt, Artificial Sequence
  synthetic polynucleotide
auaaucaaaggacaaaauggcuu

SEQ ID NO: 1339 - RNA, 23 nt, Artificial Sequence
  synthetic polynucleotide
ucccaauauaaucaaaggacauu

SEQ ID NO: 1340 - RNA, 20 nt, Artificial Sequence
  synthetic polynucleotide
  misc_feature (1)..(20): combination of 2'-fluoro, 2'-O-methyl, inverted abasic, phosphorothioate linked ribonucleotides
gagcaagcacuauauggaau

SEQ ID NO: 1341 - RNA, 20 nt, Artificial Sequence
  synthetic polynucleotide
  misc_feature (1)..(20): combination of 2'-fluoro, 2'-O-methyl, inverted abasic, phosphorothioate linked ribonucleotides
agaaguucucggcaaaugau

SEQ ID NO: 1342 - RNA, 20 nt, Artificial Sequence
  synthetic polynucleotide
  misc_feature (1)..(20): combination of 2'-fluoro, 2'-O-methyl, inverted abasic, phosphorothioate linked ribonucleotides
gagcaagcugaauuuggaau

SEQ ID NO: 1343 - RNA, 20 nt, Artificial Sequence
  synthetic polynucleotide
  misc_feature (1)..(20): combination of 2'-fluoro, 2'-O-methyl, inverted abasic, phosphorothioate linked ribonucleotides
agaaguucagcgcuaaugau

SEQ ID NO: 1344 - RNA, 20 nt, Artificial Sequence
  synthetic polynucleotide
  misc_feature (1)..(20): combination of 2'-fluoro, 2'-O-methyl, inverted abasic, phosphorothioate linked ribonucleotides
gaaggacgcacugcucugau

SEQ ID NO: 1345 - RNA, 20 nt, Artificial Sequence
  synthetic polynucleotide
  misc_feature (1)..(20): combination of 2'-fluoro, 2'-O-methyl, inverted abasic, phosphorothioate linked ribonucleotides
aggacgcacugcucugauug

SEQ ID NO: 1346 - RNA, 20 nt, Artificial Sequence
  synthetic polynucleotide
  misc_feature (1)..(20): combination of 2'-fluoro, 2'-O-methyl, inverted abasic, phosphorothioate linked ribonucleotides
ggacgcacugcucugauugg

SEQ ID NO: 1347 - RNA, 20 nt, Artificial Sequence
  synthetic polynucleotide
  misc_feature (1)..(20): combination of 2'-fluoro, 2'-O-methyl, inverted abasic, phosphorothioate linked ribonucleotides
acgcacugcucugauuggcc

SEQ ID NO: 1348 - RNA, 20 nt, Artificial Sequence
  synthetic polynucleotide
  misc_feature (1)..(20): combination of 2'-fluoro, 2'-O-methyl, inverted abasic, phosphorothioate linked ribonucleotides
cugcucugauuggcccggaa

SEQ ID NO: 1349 - RNA, 20 nt, Artificial Sequence
  synthetic polynucleotide
  misc_feature (1)..(20): combination of 2'-fluoro, 2'-O-methyl, inverted abasic, phosphorothioate linked ribonucleotides
ugcucugauuggcccggaag

SEQ ID NO: 1350 - RNA, 20 nt, Artificial Sequence
  synthetic polynucleotide
  misc_feature (1)..(20): combination of 2'-fluoro, 2'-O-methyl, inverted abasic, phosphorothioate linked ribonucleotides
gcucugauuggcccggaagg

SEQ ID NO: 1351 - RNA, 20 nt, Artificial Sequence
  synthetic polynucleotide
  misc_feature (1)..(20): combination of 2'-fluoro, 2'-O-methyl, inverted abasic, phosphorothioate linked ribonucleotides
cggggccaaaggccgcaccu

SEQ ID NO: 1352 - RNA, 20 nt, Artificial Sequence
  synthetic polynucleotide
  misc_feature (1)..(20): combination of 2'-fluoro, 2'-O-methyl, inverted abasic, phosphorothioate linked ribonucleotides
ggggccaaaggccgcaccuu

SEQ ID NO: 1353 - RNA, 20 nt, Artificial Sequence
  synthetic polynucleotide
  misc_feature (1)..(20): combination of 2'-fluoro, 2'-O-methyl, inverted abasic, phosphorothioate linked ribonucleotides
gccaaaggccgcaccuuccc

SEQ ID NO: 1354 - RNA, 20 nt, Artificial Sequence
  synthetic polynucleotide
  misc_feature (1)..(20): combination of 2'-fluoro, 2'-O-methyl, inverted abasic, phosphorothioate linked ribonucleotides
ccaaaggccgcaccuucccc

SEQ ID NO: 1355 - RNA, 20 nt, Artificial Sequence
  synthetic polynucleotide
  misc_feature (1)..(20): combination of 2'-fluoro, 2'-O-methyl, inverted abasic, phosphorothioate linked ribonucleotides
cgccaccucgcggagaagcc

SEQ ID NO: 1356 - RNA, 20 nt, Artificial Sequence
  synthetic polynucleotide
  misc_feature (1)..(20): combination of 2'-fluoro, 2'-O-methyl, inverted abasic, phosphorothioate linked ribonucleotides
gccaccucgcggagaagcca

SEQ ID NO: 1357 - RNA, 20 nt, Artificial Sequence
  synthetic polynucleotide
  misc_feature (1)..(20): combination of 2'-fluoro, 2'-O-methyl, inverted abasic, phosphorothioate linked ribonucleotides
ccaccucgcggagaagccag

SEQ ID NO: 1358 - RNA, 20 nt, Artificial Sequence
  synthetic polynucleotide
  misc_feature (1)..(20): combination of 2'-fluoro, 2'-O-methyl, inverted abasic, phosphorothioate linked ribonucleotides
accucgcggagaagccagcc

SEQ ID NO: 1359 - RNA, 20 nt, Artificial Sequence
  synthetic polynucleotide
  misc_feature (1)..(20): combination of 2'-fluoro, 2'-O-methyl, inverted abasic, phosphorothioate linked ribonucleotides
ugaucaaccaggagggaaac

SEQ ID NO: 1360 - RNA, 20 nt, Artificial Sequence
  synthetic polynucleotide
  misc_feature (1)..(20): combination of 2'-fluoro, 2'-O-methyl, inverted abasic, phosphorothioate linked ribonucleotides
aucaaccaggagggaaacau

SEQ ID NO: 1361 - RNA, 20 nt, Artificial Sequence
  synthetic polynucleotide
  misc_feature (1)..(20): combination of 2'-fluoro, 2'-O-methyl, inverted abasic, phosphorothioate linked ribonucleotides
ucaaccaggagggaaacaug

SEQ ID NO: 1362 - RNA, 20 nt, Artificial Sequence
  synthetic polynucleotide
  misc_feature (1)..(20): combination of 2'-fluoro, 2'-O-methyl, inverted abasic, phosphorothioate linked ribonucleotides
caaccaggagggaaacaugg

SEQ ID NO: 1363 - RNA, 20 nt, Artificial Sequence
  synthetic polynucleotide
  misc_feature (1)..(20): combination of 2'-fluoro, 2'-O-methyl, inverted abasic, phosphorothioate linked ribonucleotides
aaccaggagggaaacauggu

SEQ ID NO: 1364 - RNA, 20 nt, Artificial Sequence
  synthetic polynucleotide
  misc_feature (1)..(20): combination of 2'-fluoro, 2'-O-methyl, inverted abasic, phosphorothioate linked ribonucleotides
accaggagggaaacaugguu

SEQ ID NO: 1365 - RNA, 20 nt, Artificial Sequence
  synthetic polynucleotide
  misc_feature (1)..(20): combination of 2'-fluoro, 2'-O-methyl, inverted abasic, phosphorothioate linked ribonucleotides
ugcucgccaggaaccucgcc

SEQ ID NO: 1366 - RNA, 20 nt, Artificial Sequence
  synthetic polynucleotide
  misc_feature (1)..(20): combination of 2'-fluoro, 2'-O-methyl, inverted abasic, phosphorothioate linked ribonucleotides
cucgccaggaaccucgccug

SEQ ID NO: 1367 - RNA, 20 nt, Artificial Sequence
  synthetic polynucleotide
  misc_feature (1)..(20): combination of 2'-fluoro, 2'-O-methyl, inverted abasic, phosphorothioate linked ribonucleotides
ggaaccucgccugguccuga

SEQ ID NO: 1368 - RNA, 20 nt, Artificial Sequence
  synthetic polynucleotide
  misc_feature (1)..(20): combination of 2'-fluoro, 2'-O-methyl, inverted abasic, phosphorothioate linked ribonucleotides
aaccucgccugguccugauu

SEQ ID NO: 1369 - RNA, 20 nt, Artificial Sequence
  synthetic polynucleotide
  misc_feature (1)..(20): combination of 2'-fluoro, 2'-O-methyl, inverted abasic, phosphorothioate linked ribonucleotides
accucgccugguccugauuu

SEQ ID NO: 1370 - RNA, 20 nt, Artificial Sequence
  synthetic polynucleotide
  misc_feature (1)..(20): combination of 2'-fluoro, 2'-O-methyl, inverted abasic, phosphorothioate linked ribonucleotides
ccucgccugguccugauuuc

SEQ ID NO: 1371 - RNA, 20 nt, Artificial Sequence
  synthetic polynucleotide
  misc_feature (1)..(20): combination of 2'-fluoro, 2'-O-methyl, inverted abasic, phosphorothioate linked ribonucleotides
cucgccugguccugauuucc

SEQ ID NO: 1372 - RNA, 20 nt, Artificial Sequence
  synthetic polynucleotide
  misc_feature (1)..(20): combination of 2'-fluoro, 2'-O-methyl, inverted abasic, phosphorothioate linked ribonucleotides
ccugguccugauuucccuga

SEQ ID NO: 1373 - RNA, 20 nt, Artificial Sequence
  synthetic polynucleotide
  misc_feature (1)..(20): combination of 2'-fluoro, 2'-O-methyl, inverted abasic, phosphorothioate linked ribonucleotides
gacucucagugcagccuaca

SEQ ID NO: 1374 - RNA, 20 nt, Artificial Sequence
  synthetic polynucleotide
  misc_feature (1)..(20): combination of 2'-fluoro, 2'-O-methyl, inverted abasic, phosphorothioate linked ribonucleotides
cucucagugcagccuacaca

SEQ ID NO: 1375 - RNA, 20 nt, Artificial Sequence
  synthetic polynucleotide
  misc_feature (1)..(20): combination of 2'-fluoro, 2'-O-methyl, inverted abasic, phosphorothioate linked ribonucleotides
ucucagugcagccuacacaa

SEQ ID NO: 1376 - RNA, 20 nt, Artificial Sequence
  synthetic polynucleotide
  misc_feature (1)..(20): combination of 2'-fluoro, 2'-O-methyl, inverted abasic, phosphorothioate linked ribonucleotides
cucagugcagccuacacaaa

SEQ ID NO: 1377 - RNA, 20 nt, Artificial Sequence
  synthetic polynucleotide
  misc_feature (1)..(20): combination of 2'-fluoro, 2'-O-methyl, inverted abasic, phosphorothioate linked ribonucleotides
ucagugcagccuacacaaag

SEQ ID NO: 1378 - RNA, 20 nt, Artificial Sequence
  synthetic polynucleotide
  misc_feature (1)..(20): combination of 2'-fluoro, 2'-O-methyl, inverted abasic, phosphorothioate linked ribonucleotides
cuaucaaaacgcccaccaca

SEQ ID NO: 1379 - RNA, 20 nt, Artificial Sequence
  synthetic polynucleotide
  misc_feature (1)..(20): combination of 2'-fluoro, 2'-O-methyl, inverted abasic, phosphorothioate linked ribonucleotides
uaucaaaacgcccaccacaa

SEQ ID NO: 1380 - RNA, 20 nt, Artificial Sequence
  synthetic polynucleotide
  misc_feature (1)..(20): combination of 2'-fluoro, 2'-O-methyl, inverted abasic, phosphorothioate linked ribonucleotides
aucaaaacgcccaccacaaa

SEQ ID NO: 1381 - RNA, 20 nt, Artificial Sequence
  synthetic polynucleotide
  misc_feature (1)..(20): combination of 2'-fluoro, 2'-O-methyl, inverted abasic, phosphorothioate linked ribonucleotides
ucaaaacgcccaccacaaau

SEQ ID NO: 1382 - RNA, 20 nt, Artificial Sequence
  synthetic polynucleotide
  misc_feature (1)..(20): combination of 2'-fluoro, 2'-O-methyl, inverted abasic, phosphorothioate linked ribonucleotides
aaacgcccaccacaaaugca

SEQ ID NO: 1383 - RNA, 20 nt, Artificial Sequence
  synthetic polynucleotide
  misc_feature (1)..(20): combination of 2'-fluoro, 2'-O-methyl, inverted abasic, phosphorothioate linked ribonucleotides
aacgcccaccacaaaugcag

SEQ ID NO: 1384 - RNA, 20 nt, Artificial Sequence
  synthetic polynucleotide
  misc_feature (1)..(20): combination of 2'-fluoro, 2'-O-methyl, inverted abasic, phosphorothioate linked ribonucleotides
ccaguggauaaccagcuucc

SEQ ID NO: 1385 - RNA, 20 nt, Artificial Sequence
  synthetic polynucleotide
  misc_feature (1)..(20): combination of 2'-fluoro, 2'-O-methyl, inverted abasic, phosphorothioate linked ribonucleotides
caguggauaaccagcuuccu

SEQ ID NO: 1386 - RNA, 20 nt, Artificial Sequence
  synthetic polynucleotide
  misc_feature (1)..(20): combination of 2'-fluoro, 2'-O-methyl, inverted abasic, phosphorothioate linked ribonucleotides
guggauaaccagcuuccuga

SEQ ID NO: 1387 - RNA, 20 nt, Artificial Sequence
  synthetic polynucleotide
  misc_feature (1)..(20): combination of 2'-fluoro, 2'-O-methyl, inverted abasic, phosphorothioate linked ribonucleotides
gauaaccagcuuccugaagu

SEQ ID NO: 1388 - RNA, 20 nt, Artificial Sequence
  synthetic polynucleotide
  misc_feature (1)..(20): combination of 2'-fluoro, 2'-O-methyl, inverted abasic, phosphorothioate linked ribonucleotides
aucaaauagcagacuuguuc

SEQ ID NO: 1389 - RNA, 20 nt, Artificial Sequence
  synthetic polynucleotide
  misc_feature (1)..(20): combination of 2'-fluoro, 2'-O-methyl, inverted abasic, phosphorothioate linked ribonucleotides
caaauagcagacuuguuccg

SEQ ID NO: 1390 - RNA, 20 nt, Artificial Sequence
  synthetic polynucleotide
  misc_feature (1)..(20): combination of 2'-fluoro, 2'-O-methyl, inverted abasic, phosphorothioate linked ribonucleotides
aaauagcagacuuguuccga

SEQ ID NO: 1391 - RNA, 20 nt, Artificial Sequence
  synthetic polynucleotide
  misc_feature (1)..(20): combination of 2'-fluoro, 2'-O-methyl, inverted abasic, phosphorothioate linked ribonucleotides
ugagcuucuuauuggugacg

SEQ ID NO: 1392 - RNA, 20 nt, Artificial Sequence
  synthetic polynucleotide
  misc_feature (1)..(20): combination of 2'-fluoro, 2'-O-methyl, inverted abasic, phosphorothioate linked ribonucleotides
agcuucuuauuggugacgug

SEQ ID NO: 1393 - RNA, 20 nt, Artificial Sequence
  synthetic polynucleotide
  misc_feature (1)..(20): combination of 2'-fluoro, 2'-O-methyl, inverted abasic, phosphorothioate linked ribonucleotides
gcuucuuauuggugacgugg

SEQ ID NO: 1394 - RNA, 20 nt, Artificial Sequence
  synthetic polynucleotide
  misc_feature (1)..(20): combination of 2'-fluoro, 2'-O-methyl, inverted abasic, phosphorothioate linked ribonucleotides
uucuuauuggugacguggaa

SEQ ID NO: 1395 - RNA, 20 nt, Artificial Sequence
  synthetic polynucleotide
  misc_feature (1)..(20): combination of 2'-fluoro, 2'-O-methyl, inverted abasic, phosphorothioate linked ribonucleotides
uuggugacguggaacugaaa

SEQ ID NO: 1396 - RNA, 20 nt, Artificial Sequence
  synthetic polynucleotide
  misc_feature (1)..(20): combination of 2'-fluoro, 2'-O-methyl, inverted abasic, phosphorothioate linked ribonucleotides
uggugacguggaacugaaaa

SEQ ID NO: 1397 - RNA, 20 nt, Artificial Sequence
  synthetic polynucleotide
  misc_feature (1)..(20): combination of 2'-fluoro, 2'-O-methyl, inverted abasic, phosphorothioate linked ribonucleotides
ggugacguggaacugaaaag

SEQ ID NO: 1398 - RNA, 20 nt, Artificial Sequence
  synthetic polynucleotide
  misc_feature (1)..(20): combination of 2'-fluoro, 2'-O-methyl, inverted abasic, phosphorothioate linked ribonucleotides
gugacguggaacugaaaagg

SEQ ID NO: 1399 - RNA, 20 nt, Artificial Sequence
  synthetic polynucleotide
  misc_feature (1)..(20): combination of 2'-fluoro, 2'-O-methyl, inverted abasic, phosphorothioate linked ribonucleotides
gcuuguuccagaugcauuuu

SEQ ID NO: 1400 - RNA, 20 nt, Artificial Sequence
  synthetic polynucleotide
  misc_feature (1)..(20): combination of 2'-fluoro, 2'-O-methyl, inverted abasic, phosphorothioate linked ribonucleotides
guuccagaugcauuuuaacc

SEQ ID NO: 1401 - RNA, 20 nt, Artificial Sequence
  synthetic polynucleotide
  misc_feature (1)..(20): combination of 2'-fluoro, 2'-O-methyl, inverted abasic, phosphorothioate linked ribonucleotides
uuccagaugcauuuuaacca

SEQ ID NO: 1402 - RNA, 20 nt, Artificial Sequence
  synthetic polynucleotide
  misc_feature (1)..(20): combination of 2'-fluoro, 2'-O-methyl, inverted abasic, phosphorothioate linked ribonucleotides
ugcauuuuaaccacagugga

SEQ ID NO: 1403 - RNA, 20 nt, Artificial Sequence
  synthetic polynucleotide
  misc_feature (1)..(20): combination of 2'-fluoro, 2'-O-methyl, inverted abasic, phosphorothioate linked ribonucleotides
gcauuuuaaccacaguggac

SEQ ID NO: 1404 - RNA, 20 nt, Artificial Sequence
  synthetic polynucleotide
  misc_feature (1)..(20): combination of 2'-fluoro, 2'-O-methyl, inverted abasic, phosphorothioate linked ribonucleotides
ggugucaugagcaggaagga

SEQ ID NO: 1405 - RNA, 20 nt, Artificial Sequence
  synthetic polynucleotide
  misc_feature (1)..(20): combination of 2'-fluoro, 2'-O-methyl, inverted abasic, phosphorothioate linked ribonucleotides
gaaccgcuggaaacacugaa

SEQ ID NO: 1406 - RNA, 20 nt, Artificial Sequence
  synthetic polynucleotide
  misc_feature (1)..(20): combination of 2'-fluoro, 2'-O-methyl, inverted abasic, phosphorothioate linked ribonucleotides
gcuggaaacacugaagaguu

SEQ ID NO: 1407 - RNA, 20 nt, Artificial Sequence
  synthetic polynucleotide
  misc_feature (1)..(20): combination of 2'-fluoro, 2'-O-methyl, inverted abasic, phosphorothioate linked ribonucleotides
ggaaacacugaagaguuauc

SEQ ID NO: 1408 - RNA, 20 nt, Artificial Sequence
  synthetic polynucleotide
  misc_feature (1)..(20): combination of 2'-fluoro, 2'-O-methyl, inverted abasic, phosphorothioate linked ribonucleotides
gaaacacugaagaguuaucg

SEQ ID NO: 1409 - RNA, 20 nt, Artificial Sequence
  synthetic polynucleotide
  misc_feature (1)..(20): combination of 2'-fluoro, 2'-O-methyl, inverted abasic, phosphorothioate linked ribonucleotides
aaacacugaagaguuaucgc

SEQ ID NO: 1410 - RNA, 20 nt, Artificial Sequence
  synthetic polynucleotide
  misc_feature (1)..(20): combination of 2'-fluoro, 2'-O-methyl, inverted abasic, phosphorothioate linked ribonucleotides
aacacugaagaguuaucgcc

SEQ ID NO: 1411 - RNA, 20 nt, Artificial Sequence
  synthetic polynucleotide
  misc_feature (1)..(20): combination of 2'-fluoro, 2'-O-methyl, inverted abasic, phosphorothioate linked ribonucleotides
acacugaagaguuaucgcca

SEQ ID NO: 1412 - RNA, 20 nt, Artificial Sequence
  synthetic polynucleotide
  misc_feature (1)..(20): combination of 2'-fluoro, 2'-O-methyl, inverted abasic, phosphorothioate linked ribonucleotides
cacugaagaguuaucgccag

SEQ ID NO: 1413 - RNA, 20 nt, Artificial Sequence
  synthetic polynucleotide
  misc_feature (1)..(20): combination of 2'-fluoro, 2'-O-methyl, inverted abasic, phosphorothioate linked ribonucleotides
acugaagaguuaucgccagu

SEQ ID NO: 1414 - RNA, 20 nt, Artificial Sequence
  synthetic polynucleotide
  misc_feature (1)..(20): combination of 2'-fluoro, 2'-O-methyl, inverted abasic, phosphorothioate linked ribonucleotides
cugaagaguuaucgccagug

SEQ ID NO: 1415 - RNA, 20 nt, Artificial Sequence
  synthetic polynucleotide
  misc_feature (1)..(20): combination of 2'-fluoro, 2'-O-methyl, inverted abasic, phosphorothioate linked ribonucleotides
ugaagaguuaucgccagugu

SEQ ID NO: 1416 - RNA, 20 nt, Artificial Sequence
  synthetic polynucleotide
  misc_feature (1)..(20): combination of 2'-fluoro, 2'-O-methyl, inverted abasic, phosphorothioate linked ribonucleotides
gaagaguuaucgccagugug

SEQ ID NO: 1417 - RNA, 20 nt, Artificial Sequence
  synthetic polynucleotide
  misc_feature (1)..(20): combination of 2'-fluoro, 2'-O-methyl, inverted abasic, phosphorothioate linked ribonucleotides
gaguuaucgccagugugacc

SEQ ID NO: 1418 - RNA, 20 nt, Artificial Sequence
  synthetic polynucleotide
  misc_feature (1)..(20): combination of 2'-fluoro, 2'-O-methyl, inverted abasic, phosphorothioate linked ribonucleotides
aguuaucgccagugugaccc

SEQ ID NO: 1419 - RNA, 20 nt, Artificial Sequence
  synthetic polynucleotide
  misc_feature (1)..(20): combination of 2'-fluoro, 2'-O-methyl, inverted abasic, phosphorothioate linked ribonucleotides
guuaucgccagugugacccu

SEQ ID NO: 1420 - RNA, 20 nt, Artificial Sequence
  synthetic polynucleotide
  misc_feature (1)..(20): combination of 2'-fluoro, 2'-O-methyl, inverted abasic, phosphorothioate linked ribonucleotides
uuaucgccagugugacccuu

SEQ ID NO: 1421 - RNA, 20 nt, Artificial Sequence
  synthetic polynucleotide
  misc_feature (1)..(20): combination of 2'-fluoro, 2'-O-methyl, inverted abasic, phosphorothioate linked ribonucleotides
cgccagugugacccuucaga

SEQ ID NO: 1422 - RNA, 20 nt, Artificial Sequence
  synthetic polynucleotide
  misc_feature (1)..(20): combination of 2'-fluoro, 2'-O-methyl, inverted abasic, phosphorothioate linked ribonucleotides
gccagugugacccuucagaa

SEQ ID NO: 1423 - RNA, 20 nt, Artificial Sequence
  synthetic polynucleotide
  misc_feature (1)..(20): combination of 2'-fluoro, 2'-O-methyl, inverted abasic, phosphorothioate linked ribonucleotides
cagugugacccuucagaacg

SEQ ID NO: 1424 - RNA, 20 nt, Artificial Sequence
  synthetic polynucleotide
  misc_feature (1)..(20): combination of 2'-fluoro, 2'-O-methyl, inverted abasic, phosphorothioate linked ribonucleotides
agugugacccuucagaacga

SEQ ID NO: 1425 - RNA, 20 nt, Artificial Sequence
  synthetic polynucleotide
  misc_feature (1)..(20): combination of 2'-fluoro, 2'-O-methyl, inverted abasic, phosphorothioate linked ribonucleotides
gugugacccuucagaacgaa

SEQ ID NO: 1426 - RNA, 20 nt, Artificial Sequence
  synthetic polynucleotide
  misc_feature (1)..(20): combination of 2'-fluoro, 2'-O-methyl, inverted abasic, phosphorothioate linked ribonucleotides
ugugacccuucagaacgaaa

SEQ ID NO: 1427 - RNA, 20 nt, Artificial Sequence
  synthetic polynucleotide
  misc_feature (1)..(20): combination of 2'-fluoro, 2'-O-methyl, inverted abasic, phosphorothioate linked ribonucleotides
gugacccuucagaacgaaag

SEQ ID NO: 1428 - RNA, 20 nt, Artificial Sequence
  synthetic polynucleotide
  misc_feature (1)..(20): combination of 2'-fluoro, 2'-O-methyl, inverted abasic, phosphorothioate linked ribonucleotides
ugacccuucagaacgaaagu

SEQ ID NO: 1429 - RNA, 20 nt, Artificial Sequence
  synthetic polynucleotide
  misc_feature (1)..(20): combination of 2'-fluoro, 2'-O-methyl, inverted abasic, phosphorothioate linked ribonucleotides
gacccuucagaacgaaaguu

SEQ ID NO: 1430 - RNA, 20 nt, Artificial Sequence
  synthetic polynucleotide
  misc_feature (1)..(20): combination of 2'-fluoro, 2'-O-methyl, inverted abasic, phosphorothioate linked ribonucleotides
acccuucagaacgaaaguua

SEQ ID NO: 1431 - RNA, 20 nt, Artificial Sequence
  synthetic polynucleotide
  misc_feature (1)..(20): combination of 2'-fluoro, 2'-O-methyl, inverted abasic, phosphorothioate linked ribonucleotides
cccuucagaacgaaaguuau

SEQ ID NO: 1432 - RNA, 20 nt, Artificial Sequence
  synthetic polynucleotide
  misc_feature (1)..(20): combination of 2'-fluoro, 2'-O-methyl, inverted abasic, phosphorothioate linked ribonucleotides
ccuucagaacgaaaguuaua

SEQ ID NO: 1433 - RNA, 20 nt, Artificial Sequence
  synthetic polynucleotide
  misc_feature (1)..(20): combination of 2'-fluoro, 2'-O-methyl, inverted abasic, phosphorothioate linked ribonucleotides
cuucagaacgaaaguuauau

SEQ ID NO: 1434 - RNA, 20 nt, Artificial Sequence
  synthetic polynucleotide
  misc_feature (1)..(20): combination of 2'-fluoro, 2'-O-methyl, inverted abasic, phosphorothioate linked ribonucleotides
uucagaacgaaaguuauaug

SEQ ID NO: 1435 - RNA, 20 nt, Artificial Sequence
  synthetic polynucleotide
  misc_feature (1)..(20): combination of 2'-fluoro, 2'-O-methyl, inverted abasic, phosphorothioate linked ribonucleotides
ucagaacgaaaguuauaugg

SEQ ID NO: 1436 - RNA, 20 nt, Artificial Sequence
  synthetic polynucleotide
  misc_feature (1)..(20): combination of 2'-fluoro, 2'-O-methyl, inverted abasic, phosphorothioate linked ribonucleotides
cagaacgaaaguuauaugga

SEQ ID NO: 1437 - RNA, 20 nt, Artificial Sequence
  synthetic polynucleotide
  misc_feature (1)..(20): combination of 2'-fluoro, 2'-O-methyl, inverted abasic, phosphorothioate linked ribonucleotides
aguuauauggaaaaucacca

SEQ ID NO: 1438 - RNA, 20 nt, Artificial Sequence
  synthetic polynucleotide
  misc_feature (1)..(20): combination of 2'-fluoro, 2'-O-methyl, inverted abasic, phosphorothioate linked ribonucleotides
uuauauggaaaaucaccacu

SEQ ID NO: 1439 - RNA, 20 nt, Artificial Sequence
  synthetic polynucleotide
  misc_feature (1)..(20): combination of 2'-fluoro, 2'-O-methyl, inverted abasic, phosphorothioate linked ribonucleotides
aauagcagacuuguuccgac

SEQ ID NO: 1440 - RNA, 20 nt, Artificial Sequence
  synthetic polynucleotide
  misc_feature (1)..(20): combination of 2'-fluoro, 2'-O-methyl, inverted abasic, phosphorothioate linked ribonucleotides
auagcagacuuguuccgacc

SEQ ID NO: 1441 - RNA, 20 nt, Artificial Sequence
  synthetic polynucleotide
  misc_feature (1)..(20): combination of 2'-fluoro, 2'-O-methyl, inverted abasic, phosphorothioate linked ribonucleotides
uagcagacuuguuccgaccc

SEQ ID NO: 1442 - RNA, 20 nt, Artificial Sequence
  synthetic polynucleotide
  misc_feature (1)..(20): combination of 2'-fluoro, 2'-O-methyl, inverted abasic, phosphorothioate linked ribonucleotides
agcagacuuguuccgaccca

SEQ ID NO: 1443 - RNA, 20 nt, Artificial Sequence
  synthetic polynucleotide
  misc_feature (1)..(20): combination of 2'-fluoro, 2'-O-methyl, inverted abasic, phosphorothioate linked ribonucleotides
gcagacuuguuccgacccaa

SEQ ID NO: 1444 - RNA, 20 nt, Artificial Sequence
  synthetic polynucleotide
  misc_feature (1)..(20): combination of 2'-fluoro, 2'-O-methyl, inverted abasic, phosphorothioate linked ribonucleotides
cagacuuguuccgacccaag

SEQ ID NO: 1445 - RNA, 20 nt, Artificial Sequence
  synthetic polynucleotide
  misc_feature (1)..(20): combination of 2'-fluoro, 2'-O-methyl, inverted abasic, phosphorothioate linked ribonucleotides
agacuuguuccgacccaagg

SEQ ID NO: 1446 - RNA, 20 nt, Artificial Sequence
  synthetic polynucleotide
  misc_feature (1)..(20): combination of 2'-fluoro, 2'-O-methyl, inverted abasic, phosphorothioate linked ribonucleotides
gacuuguuccgacccaagga

SEQ ID NO: 1447 - RNA, 20 nt, Artificial Sequence
  synthetic polynucleotide
  misc_feature (1)..(20): combination of 2'-fluoro, 2'-O-methyl, inverted abasic, phosphorothioate linked ribonucleotides
acuuguuccgacccaaggac

SEQ ID NO: 1448 - RNA, 20 nt, Artificial Sequence
  synthetic polynucleotide
  misc_feature (1)..(20): combination of 2'-fluoro, 2'-O-methyl, inverted abasic, phosphorothioate linked ribonucleotides
cuuguuccgacccaaggacc

SEQ ID NO: 1449 - RNA, 20 nt, Artificial Sequence
  synthetic polynucleotide
  misc_feature (1)..(20): combination of 2'-fluoro, 2'-O-methyl, inverted abasic, phosphorothioate linked ribonucleotides
uuccgacccaaggaccagau

SEQ ID NO: 1450 - RNA, 20 nt, Artificial Sequence
  synthetic polynucleotide
  misc_feature (1)..(20): combination of 2'-fluoro, 2'-O-methyl, inverted abasic, phosphorothioate linked ribonucleotides
aaggaccagauugcuuacuc

SEQ ID NO: 1451 - RNA, 20 nt, Artificial Sequence
  synthetic polynucleotide
  misc_feature (1)..(20): combination of 2'-fluoro, 2'-O-methyl, inverted abasic, phosphorothioate linked ribonucleotides
gaccagauugcuuacucaga

SEQ ID NO: 1452 - RNA, 20 nt, Artificial Sequence
  synthetic polynucleotide
  misc_feature (1)..(20): combination of 2'-fluoro, 2'-O-methyl, inverted abasic, phosphorothioate linked ribonucleotides
ccagauugcuuacucagaca

SEQ ID NO: 1453 - RNA, 20 nt, Artificial Sequence
  synthetic polynucleotide
  misc_feature (1)..(20): combination of 2'-fluoro, 2'-O-methyl, inverted abasic, phosphorothioate linked ribonucleotides
cagauugcuuacucagacac

SEQ ID NO: 1454 - RNA, 20 nt, Artificial Sequence
  synthetic polynucleotide
  misc_feature (1)..(20): combination of 2'-fluoro, 2'-O-methyl, inverted abasic, phosphorothioate linked ribonucleotides
agauugcuuacucagacacc

SEQ ID NO: 1455 - RNA, 20 nt, Artificial Sequence
  synthetic polynucleotide
  misc_feature (1)..(20): combination of 2'-fluoro, 2'-O-methyl, inverted abasic, phosphorothioate linked ribonucleotides
gauugcuuacucagacacca

SEQ ID NO: 1456 - RNA, 20 nt, Artificial Sequence
  synthetic polynucleotide
  misc_feature (1)..(20): combination of 2'-fluoro, 2'-O-methyl, inverted abasic, phosphorothioate linked ribonucleotides
auugcuuacucagacaccag

SEQ ID NO: 1457 - RNA, 20 nt, Artificial Sequence
  synthetic polynucleotide
  misc_feature (1)..(20): combination of 2'-fluoro, 2'-O-methyl, inverted abasic, phosphorothioate linked ribonucleotides
gcuuacucagacaccagccc

SEQ ID NO: 1458 - RNA, 20 nt, Artificial Sequence
  synthetic polynucleotide
  misc_feature (1)..(20): combination of 2'-fluoro, 2'-O-methyl, inverted abasic, phosphorothioate linked ribonucleotides
uuacucagacaccagcccau

SEQ ID NO: 1459 - RNA, 20 nt, Artificial Sequence
  synthetic polynucleotide
  misc_feature (1)..(20): combination of 2'-fluoro, 2'-O-methyl, inverted abasic, phosphorothioate linked ribonucleotides
cggaucucaacuccaggcua

SEQ ID NO: 1460 - RNA, 20 nt, Artificial Sequence
  synthetic polynucleotide
  misc_feature (1)..(20): combination of 2'-fluoro, 2'-O-methyl, inverted abasic, phosphorothioate linked ribonucleotides
ggaucucaacuccaggcuag

SEQ ID NO: 1461 - RNA, 20 nt, Artificial Sequence
  synthetic polynucleotide
  misc_feature (1)..(20): combination of 2'-fluoro, 2'-O-methyl, inverted abasic, phosphorothioate linked ribonucleotides
gaucucaacuccaggcuaga

SEQ ID NO: 1462 - RNA, 20 nt, Artificial Sequence
  synthetic polynucleotide
  misc_feature (1)..(20): combination of 2'-fluoro, 2'-O-methyl, inverted abasic, phosphorothioate linked ribonucleotides
aucucaacuccaggcuagag

SEQ ID NO: 1463 - RNA, 20 nt, Artificial Sequence
  synthetic polynucleotide
  misc_feature (1)..(20): combination of 2'-fluoro, 2'-O-methyl, inverted abasic, phosphorothioate linked ribonucleotides
aacuccaggcuagagaagaa

SEQ ID NO: 1464 - RNA, 20 nt, Artificial Sequence
  synthetic polynucleotide
  misc_feature (1)..(20): combination of 2'-fluoro, 2'-O-methyl, inverted abasic, phosphorothioate linked ribonucleotides
agaagaaaguuaaagcaacc

SEQ ID NO: 1465 - RNA, 20 nt, Artificial Sequence
  synthetic polynucleotide
  misc_feature (1)..(20): combination of 2'-fluoro, 2'-O-methyl, inverted abasic, phosphorothioate linked ribonucleotides
gaagaaaguuaaagcaacca

SEQ ID NO: 1466 - RNA, 20 nt, Artificial Sequence
  synthetic polynucleotide
  misc_feature (1)..(20): combination of 2'-fluoro, 2'-O-methyl, inverted abasic, phosphorothioate linked ribonucleotides
aagaaaguuaaagcaaccaa

SEQ ID NO: 1467 - RNA, 20 nt, Artificial Sequence
  synthetic polynucleotide
  misc_feature (1)..(20): combination of 2'-fluoro, 2'-O-methyl, inverted abasic, phosphorothioate linked ribonucleotides
agaaaguuaaagcaaccaac

SEQ ID NO: 1468 - RNA, 20 nt, Artificial Sequence
  synthetic polynucleotide
  misc_feature (1)..(20): combination of 2'-fluoro, 2'-O-methyl, inverted abasic, phosphorothioate linked ribonucleotides
gaaaguuaaagcaaccaacu

SEQ ID NO: 1469 - RNA, 20 nt, Artificial Sequence
  synthetic polynucleotide
  misc_feature (1)..(20): combination of 2'-fluoro, 2'-O-methyl, inverted abasic, phosphorothioate linked ribonucleotides
aaaguuaaagcaaccaacuu

SEQ ID NO: 1470 - RNA, 20 nt, Artificial Sequence
  synthetic polynucleotide
  misc_feature (1)..(20): combination of 2'-fluoro, 2'-O-methyl, inverted abasic, phosphorothioate linked ribonucleotides
aaguuaaagcaaccaacuuc

SEQ ID NO: 1471 - RNA, 20 nt, Artificial Sequence
  synthetic polynucleotide
  misc_feature (1)..(20): combination of 2'-fluoro, 2'-O-methyl, inverted abasic, phosphorothioate linked ribonucleotides
aguuaaagcaaccaacuuca

SEQ ID NO: 1472 - RNA, 20 nt, Artificial Sequence
  synthetic polynucleotide
  misc_feature (1)..(20): combination of 2'-fluoro, 2'-O-methyl, inverted abasic, phosphorothioate linked ribonucleotides
guuaaagcaaccaacuucag

SEQ ID NO: 1473 - RNA, 20 nt, Artificial Sequence
  synthetic polynucleotide
  misc_feature (1)..(20): combination of 2'-fluoro, 2'-O-methyl, inverted abasic, phosphorothioate linked ribonucleotides
aaagcaaccaacuucaggcc

SEQ ID NO: 1474 - RNA, 20 nt, Artificial Sequence
  synthetic polynucleotide
  misc_feature (1)..(20): combination of 2'-fluoro, 2'-O-methyl, inverted abasic, phosphorothioate linked ribonucleotides
agcaaccaacuucaggccca

SEQ ID NO: 1475 - RNA, 20 nt, Artificial Sequence
  synthetic polynucleotide
  misc_feature (1)..(20): combination of 2'-fluoro, 2'-O-methyl, inverted abasic, phosphorothioate linked ribonucleotides
caaccaacuucaggcccaau

SEQ ID NO: 1476 - RNA, 20 nt, Artificial Sequence
  synthetic polynucleotide
  misc_feature (1)..(20): combination of 2'-fluoro, 2'-O-methyl, inverted abasic, phosphorothioate linked ribonucleotides
aaccaacuucaggcccaaua

SEQ ID NO: 1477 - RNA, 20 nt, Artificial Sequence
  synthetic polynucleotide
  misc_feature (1)..(20): combination of 2'-fluoro, 2'-O-methyl, inverted abasic, phosphorothioate linked ribonucleotides
ccaacuucaggcccaauauu

SEQ ID NO: 1478 - RNA, 20 nt, Artificial Sequence
  synthetic polynucleotide
  misc_feature (1)..(20): combination of 2'-fluoro, 2'-O-methyl, inverted abasic, phosphorothioate linked ribonucleotides
caacuucaggcccaauauug

SEQ ID NO: 1479 - RNA, 20 nt, Artificial Sequence
  synthetic polynucleotide
  misc_feature (1)..(20): combination of 2'-fluoro, 2'-O-methyl, inverted abasic, phosphorothioate linked ribonucleotides
acuucaggcccaauauugua

SEQ ID NO: 1480 - RNA, 20 nt, Artificial Sequence
  synthetic polynucleotide
  misc_feature (1)..(20): combination of 2'-fluoro, 2'-O-methyl, inverted abasic, phosphorothioate linked ribonucleotides
cuucaggcccaauauuguaa

SEQ ID NO: 1481 - RNA, 20 nt, Artificial Sequence
  synthetic polynucleotide
  misc_feature (1)..(20): combination of 2'-fluoro, 2'-O-methyl, inverted abasic, phosphorothioate linked ribonucleotides
uucaggcccaauauuguaau

SEQ ID NO: 1482 - RNA, 20 nt, Artificial Sequence
  synthetic polynucleotide
  misc_feature (1)..(20)
ucaggcccaauauuguaauu

SEQ ID NO: 1483 - RNA, 20 nt, Artificial Sequence
  synthetic polynucleotide
  misc_feature (1)..(20): combination of 2'-fluoro, 2'-O-methyl, inverted abasic, phosphorothioate linked ribonucleotides
aggcccaauauuguaauuuc

SEQ ID NO: 1484 - RNA, 20 nt, Artificial Sequence
  synthetic polynucleotide
  misc_feature (1)..(20): combination of 2'-fluoro, 2'-O-methyl, inverted abasic, phosphorothioate linked ribonucleotides
ggcccaauauuguaauuuca

SEQ ID NO: 1485 - RNA, 20 nt, Artificial Sequence
  synthetic polynucleotide
  misc_feature (1)..(20): combination of 2'-fluoro, 2'-O-methyl, inverted abasic, phosphorothioate linked ribonucleotides
gaugagcuucuuauugguga

SEQ ID NO: 1486 - RNA, 20 nt, Artificial Sequence
  synthetic polynucleotide
  misc_feature (1)..(20): combination of 2'-fluoro, 2'-O-methyl, inverted abasic, phosphorothioate linked ribonucleotides
augagcuucuuauuggugac

SEQ ID NO: 1487 - RNA, 20 nt, Artificial Sequence
  synthetic polynucleotide
  misc_feature (1)..(20): combination of 2'-fluoro, 2'-O-methyl, inverted abasic, phosphorothioate linked ribonucleotides
auauggaaaaucaccacucu

SEQ ID NO: 1488 - RNA, 20 nt, Artificial Sequence
  synthetic polynucleotide
  misc_feature (1)..(20): combination of 2'-fluoro, 2'-O-methyl, inverted abasic, phosphorothioate linked ribonucleotides
uauggaaaaucaccacucuu

SEQ ID NO: 1489 - RNA, 20 nt, Artificial Sequence
  synthetic polynucleotide
  misc_feature (1)..(20): combination of 2'-fluoro, 2'-O-methyl, inverted abasic, phosphorothioate linked ribonucleotides
auggaaaaucaccacucuuu

SEQ ID NO: 1490 - RNA, 20 nt, Artificial Sequence
  synthetic polynucleotide
  misc_feature (1)..(20): combination of 2'-fluoro, 2'-O-methyl, inverted abasic, phosphorothioate linked ribonucleotides
uggaaaaucaccacucuuug

SEQ ID NO: 1491 - RNA, 20 nt, Artificial Sequence
  synthetic polynucleotide
  misc_feature (1)..(20): combination of 2'-fluoro, 2'-O-methyl, inverted abasic, phosphorothioate linked ribonucleotides
cuggaaaacccagggaccau

SEQ ID NO: 1492 - RNA, 20 nt, Artificial Sequence
  synthetic polynucleotide
  misc_feature (1)..(20): combination of 2'-fluoro, 2'-O-methyl, inverted abasic, phosphorothioate linked ribonucleotides
ggaaaacccagggaccauca

SEQ ID NO: 1493 - RNA, 20 nt, Artificial Sequence
  synthetic polynucleotide
  misc_feature (1)..(20): combination of 2'-fluoro, 2'-O-methyl, inverted abasic, phosphorothioate linked ribonucleotides
gaaaacccagggaccaucaa

SEQ ID NO: 1494 - RNA, 20 nt, Artificial Sequence
  synthetic polynucleotide
  misc_feature (1)..(20): combination of 2'-fluoro, 2'-O-methyl, inverted abasic, phosphorothioate linked ribonucleotides
cccagggaccaucaaagugg

SEQ ID NO: 1495 - RNA, 20 nt, Artificial Sequence
  synthetic polynucleotide
  misc_feature (1)..(20): combination of 2'-fluoro, 2'-O-methyl, inverted abasic, phosphorothioate linked ribonucleotides
ccagggaccaucaaaguggg

SEQ ID NO: 1496 - RNA, 20 nt, Artificial Sequence
  synthetic polynucleotide
  misc_feature (1)..(20): combination of 2'-fluoro, 2'-O-methyl, inverted abasic, phosphorothioate linked ribonucleotides
gggaccaucaaagugggaga

SEQ ID NO: 1497 - RNA, 20 nt, Artificial Sequence
  synthetic polynucleotide
  misc_feature (1)..(20): combination of 2'-fluoro, 2'-O-methyl, inverted abasic, phosphorothioate linked ribonucleotides
gggagacccuguguaccugc

SEQ ID NO: 1498 - RNA, 20 nt, Artificial Sequence
  synthetic polynucleotide
  misc_feature (1)..(20): combination of 2'-fluoro, 2'-O-methyl, inverted abasic, phosphorothioate linked ribonucleotides
guaccugcugggccaguaau

SEQ ID NO: 1499 - RNA, 20 nt, Artificial Sequence
  synthetic polynucleotide
  misc_feature (1)..(20): combination of 2'-fluoro, 2'-O-methyl, inverted abasic, phosphorothioate linked ribonucleotides
ugcugggccaguaaugggaa

SEQ ID NO: 1500 - RNA, 20 nt, Artificial Sequence
  synthetic polynucleotide
  misc_feature (1)..(20): combination of 2'-fluoro, 2'-O-methyl, inverted abasic, phosphorothioate linked ribonucleotides
  misc_feature (1)..(20)
aaauguucucaaaaaugaca

SEQ ID NO: 1501 - RNA, 20 nt, Artificial Sequence
  synthetic polynucleotide
  misc_feature (1)..(20): combination of 2'-fluoro, 2'-O-methyl, inverted abasic, phosphorothioate linked ribonucleotides
aauguucucaaaaaugacaa

SEQ ID NO: 1502 - RNA, 20 nt, Artificial Sequence
  synthetic polynucleotide
  misc_feature (1)..(20): combination of 2'-fluoro, 2'-O-methyl, inverted abasic, phosphorothioate linked ribonucleotides
aaaaugacaacacuugaagc

SEQ ID NO: 1503 - RNA, 20 nt, Artificial Sequence
  synthetic polynucleotide
  misc_feature (1)..(20): combination of 2'-fluoro, 2'-O-methyl, inverted abasic, phosphorothioate linked ribonucleotides
aaaugacaacacuugaagca

SEQ ID NO: 1504 - RNA, 20 nt, Artificial Sequence
  synthetic polynucleotide
  misc_feature (1)..(20): combination of 2'-fluoro, 2'-O-methyl, inverted abasic, phosphorothioate linked ribonucleotides
aaugacaacacuugaagcau

SEQ ID NO: 1505 - RNA, 20 nt, Artificial Sequence
  synthetic polynucleotide
  misc_feature (1)..(20): combination of 2'-fluoro, 2'-O-methyl, inverted abasic, phosphorothioate linked ribonucleotides
ugacaacacuugaagcaugg

SEQ ID NO: 1506 - RNA, 20 nt, Artificial Sequence
  synthetic polynucleotide
  misc_feature (1)..(20): combination of 2'-fluoro, 2'-O-methyl, inverted abasic, phosphorothioate linked ribonucleotides
gacaacacuugaagcauggu

SEQ ID NO: 1507 - RNA, 20 nt, Artificial Sequence
  synthetic polynucleotide
  misc_feature (1)..(20): combination of 2'-fluoro, 2'-O-methyl, inverted abasic, phosphorothioate linked ribonucleotides
acaacacuugaagcauggug

SEQ ID NO: 1508 - RNA, 20 nt, Artificial Sequence
  synthetic polynucleotide
  misc_feature (1)..(20): combination of 2'-fluoro, 2'-O-methyl, inverted abasic, phosphorothioate linked ribonucleotides
cacuugaagcaugguguuuc

SEQ ID NO: 1509 - RNA, 20 nt, Artificial Sequence
  synthetic polynucleotide
  misc_feature (1)..(20): combination of 2'-fluoro, 2'-O-methyl, inverted abasic, phosphorothioate linked ribonucleotides
cuugaagcaugguguuucag

SEQ ID NO: 1510 - RNA, 20 nt, Artificial Sequence
  synthetic polynucleotide
  misc_feature (1)..(20): combination of 2'-fluoro, 2'-O-methyl, inverted abasic, phosphorothioate linked ribonucleotides
cuggugucucaaugcuucaa

SEQ ID NO: 1511 - RNA, 20 nt, Artificial Sequence
  synthetic polynucleotide
  misc_feature (1)..(20): combination of 2'-fluoro, 2'-O-methyl, inverted abasic, phosphorothioate linked ribonucleotides
uggugucucaaugcuucaau

SEQ ID NO: 1512 - RNA, 20 nt, Artificial Sequence
  synthetic polynucleotide
  misc_feature (1)..(20): combination of 2'-fluoro, 2'-O-methyl, inverted abasic, phosphorothioate linked ribonucleotides
ggugucucaaugcuucaaug

SEQ ID NO: 1513 - RNA, 20 nt, Artificial Sequence
  synthetic polynucleotide
  misc_feature (1)..(20): combination of 2'-fluoro, 2'-O-methyl, inverted abasic, phosphorothioate linked ribonucleotides
gugucucaaugcuucaaugu

SEQ ID NO: 1514 - RNA, 20 nt, Artificial Sequence
  synthetic polynucleotide
  misc_feature (1)..(20): combination of 2'-fluoro, 2'-O-methyl, inverted abasic, phosphorothioate linked ribonucleotides
ugucucaaugcuucaauguc

SEQ ID NO: 1515 - RNA, 20 nt, Artificial Sequence
  synthetic polynucleotide
  misc_feature (1)..(20): combination of 2'-fluoro, 2'-O-methyl, inverted abasic, phosphorothioate linked ribonucleotides
ucucaaugcuucaauguccc

SEQ ID NO: 1516 - RNA, 20 nt, Artificial Sequence
  synthetic polynucleotide
  misc_feature (1)..(20): combination of 2'-fluoro, 2'-O-methyl, inverted abasic, phosphorothioate linked ribonucleotides
cucaaugcuucaauguccca

SEQ ID NO: 1517 - RNA, 20 nt, Artificial Sequence
  synthetic polynucleotide
  misc_feature (1)..(20): combination of 2'-fluoro, 2'-O-methyl, inverted abasic, phosphorothioate linked ribonucleotides
caaugcuucaaugucccagu

SEQ ID NO: 1518 - RNA, 20 nt, Artificial Sequence
  synthetic polynucleotide
  misc_feature (1)..(20): combination of 2'-fluoro, 2'-O-methyl, inverted abasic, phosphorothioate linked ribonucleotides
augcuucaaugucccagugc

SEQ ID NO: 1519 - RNA, 20 nt, Artificial Sequence
  synthetic polynucleotide
  misc_feature (1)..(20): combination of 2'-fluoro, 2'-O-methyl, inverted abasic, phosphorothioate linked ribonucleotides
ugcuucaaugucccagugca

SEQ ID NO: 1520 - RNA, 20 nt, Artificial Sequence
  synthetic polynucleotide
  misc_feature (1)..(20): combination of 2'-fluoro, 2'-O-methyl, inverted abasic, phosphorothioate linked ribonucleotides
aaugacaagacaggauucug

SEQ ID NO: 1521 - RNA, 20 nt, Artificial Sequence
  synthetic polynucleotide
  misc_feature (1)..(20): combination of 2'-fluoro, 2'-O-methyl, inverted abasic, phosphorothioate linked ribonucleotides
augacaagacaggauucuga

SEQ ID NO: 1522 - RNA, 20 nt, Artificial Sequence
  synthetic polynucleotide
  misc_feature (1)..(20): combination of 2'-fluoro, 2'-O-methyl, inverted abasic, phosphorothioate linked ribonucleotides
gacaagacaggauucugaaa

SEQ ID NO: 1523 - RNA, 20 nt, Artificial Sequence
  synthetic polynucleotide
  misc_feature (1)..(20): combination of 2'-fluoro, 2'-O-methyl, inverted abasic, phosphorothioate linked ribonucleotides
aagacaggauucugaaaacu

SEQ ID NO: 1524 - RNA, 20 nt, Artificial Sequence
  synthetic polynucleotide
  misc_feature (1)..(20): combination of 2'-fluoro, 2'-O-methyl, inverted abasic, phosphorothioate linked ribonucleotides
acaggauucugaaaacuccc

SEQ ID NO: 1525 - RNA, 20 nt, Artificial Sequence
  synthetic polynucleotide
  misc_feature (1)..(20): combination of 2'-fluoro, 2'-O-methyl, inverted abasic, phosphorothioate linked ribonucleotides
cccguuuaacugauuaugga

SEQ ID NO: 1526 - RNA, 20 nt, Artificial Sequence
  synthetic polynucleotide
  misc_feature (1)..(20): combination of 2'-fluoro, 2'-O-methyl, inverted abasic, phosphorothioate linked ribonucleotides
uuuaacugauuauggaauag

SEQ ID NO: 1527 - RNA, 20 nt, Artificial Sequence
  synthetic polynucleotide
  misc_feature (1)..(20): combination of 2'-fluoro, 2'-O-methyl, inverted abasic, phosphorothioate linked ribonucleotides
uuaacugauuauggaauagu

SEQ ID NO: 1528 - RNA, 20 nt, Artificial Sequence
  synthetic polynucleotide
  misc_feature (1)..(20): combination of 2'-fluoro, 2'-O-methyl, inverted abasic, phosphorothioate linked ribonucleotides
aacugauuauggaauaguuc

SEQ ID NO: 1529 - RNA, 20 nt, Artificial Sequence
  synthetic polynucleotide
  misc_feature (1)..(20): combination of 2'-fluoro, 2'-O-methyl, inverted abasic, phosphorothioate linked ribonucleotides
acugauuauggaauaguucu

SEQ ID NO: 1530 - RNA, 20 nt, Artificial Sequence
  synthetic polynucleotide
  misc_feature (1)..(20): combination of 2'-fluoro, 2'-O-methyl, inverted abasic, phosphorothioate linked ribonucleotides
cugauuauggaauaguucuu

SEQ ID NO: 1531 - RNA, 20 nt, Artificial Sequence
  synthetic polynucleotide
  misc_feature (1)..(20): combination of 2'-fluoro, 2'-O-methyl, inverted abasic, phosphorothioate linked ribonucleotides
gauuauggaauaguucuuuc

SEQ ID NO: 1532 - RNA, 20 nt, Artificial Sequence
  synthetic polynucleotide
  misc_feature (1)..(20): combination of 2'-fluoro, 2'-O-methyl, inverted abasic, phosphorothioate linked ribonucleotides
auuauggaauaguucuuucu

SEQ ID NO: 1533 - RNA, 20 nt, Artificial Sequence
  synthetic polynucleotide
  misc_feature (1)..(20): combination of 2'-fluoro, 2'-O-methyl, inverted abasic, phosphorothioate linked ribonucleotides
uugcauccugucacuaccac

SEQ ID NO: 1534 - RNA, 20 nt, Artificial Sequence
  synthetic polynucleotide
  misc_feature (1)..(20): combination of 2'-fluoro, 2'-O-methyl, inverted abasic, phosphorothioate linked ribonucleotides
caccccaaauauggcuggaa

SEQ ID NO: 1535 - RNA, 20 nt, Artificial Sequence
  synthetic polynucleotide
  misc_feature (1)..(20): combination of 2'-fluoro, 2'-O-methyl, inverted abasic, phosphorothioate linked ribonucleotides
ccccaaauauggcuggaaug

SEQ ID NO: 1536 - RNA, 20 nt, Artificial Sequence
  synthetic polynucleotide
  misc_feature (1)..(20): combination of 2'-fluoro, 2'-O-methyl, inverted abasic, phosphorothioate linked ribonucleotides
cucaagccccgggcuagcuu

SEQ ID NO: 1537 - RNA, 20 nt, Artificial Sequence
  synthetic polynucleotide
  misc_feature (1)..(20): combination of 2'-fluoro, 2'-O-methyl, inverted abasic, phosphorothioate linked ribonucleotides
ucaagccccgggcuagcuuu

SEQ ID NO: 1538 - RNA, 20 nt, Artificial Sequence
  synthetic polynucleotide
  misc_feature (1)..(20): combination of 2'-fluoro, 2'-O-methyl, inverted abasic, phosphorothioate linked ribonucleotides
aagccccgggcuagcuuuug

SEQ ID NO: 1539 - RNA, 20 nt, Artificial Sequence
  synthetic polynucleotide
  misc_feature (1)..(20): combination of 2'-fluoro, 2'-O-methyl, inverted abasic, phosphorothioate linked ribonucleotides
agccccgggcuagcuuuuga

SEQ ID NO: 1540 - RNA, 20 nt, Artificial Sequence
  synthetic polynucleotide
  misc_feature (1)..(20): combination of 2'-fluoro, 2'-O-methyl, inverted abasic, phosphorothioate linked ribonucleotides
gccccgggcuagcuuuugaa

SEQ ID NO: 1541 - RNA, 20 nt, Artificial Sequence
  synthetic polynucleotide
  misc_feature (1)..(20): combination of 2'-fluoro, 2'-O-methyl, inverted abasic, phosphorothioate linked ribonucleotides
cccgggcuagcuuuugaaau

SEQ ID NO: 1542 - RNA, 20 nt, Artificial Sequence
  synthetic polynucleotide
  misc_feature (1)..(20): combination of 2'-fluoro, 2'-O-methyl, inverted abasic, phosphorothioate linked ribonucleotides
ggcuagcuuuugaaauggca

SEQ ID NO: 1543 - RNA, 20 nt, Artificial Sequence
  synthetic polynucleotide
  misc_feature (1)..(20): combination of 2'-fluoro, 2'-O-methyl, inverted abasic, phosphorothioate linked ribonucleotides
auaaagacugaggugaccuu

SEQ ID NO: 1544 - RNA, 20 nt, Artificial Sequence
  synthetic polynucleotide
  misc_feature (1)..(20): combination of 2'-fluoro, 2'-O-methyl, inverted abasic, phosphorothioate linked ribonucleotides
cugcagauauuaauuuucca

SEQ ID NO: 1545 - RNA, 20 nt, Artificial Sequence
  synthetic polynucleotide
  misc_feature (1)..(20): combination of 2'-fluoro, 2'-O-methyl, inverted abasic, phosphorothioate linked ribonucleotides
gauauuaauuuuccauagau

SEQ ID NO: 1546 - RNA, 20 nt, Artificial Sequence
  synthetic polynucleotide
  misc_feature (1)..(20): combination of 2'-fluoro, 2'-O-methyl, inverted abasic, phosphorothioate linked ribonucleotides
auauuaauuuuccauagauc

SEQ ID NO: 1547 - RNA, 20 nt, Artificial Sequence
  synthetic polynucleotide
  misc_feature (1)..(20): combination of 2'-fluoro, 2'-O-methyl, inverted abasic, phosphorothioate linked ribonucleotides
uaauuuuccauagaucugga

SEQ ID NO: 1548 - RNA, 20 nt, Artificial Sequence
  synthetic polynucleotide
  misc_feature (1)..(20): combination of 2'-fluoro, 2'-O-methyl, inverted abasic, phosphorothioate linked ribonucleotides
aauuuuccauagaucuggau

SEQ ID NO: 1549 - RNA, 20 nt, Artificial Sequence
  synthetic polynucleotide
  misc_feature (1)..(20): combination of 2'-fluoro, 2'-O-methyl, inverted abasic, phosphorothioate linked ribonucleotides
auuuuccauagaucuggauc

SEQ ID NO: 1550 - RNA, 20 nt, Artificial Sequence
  synthetic polynucleotide
  misc_feature (1)..(20): combination of 2'-fluoro, 2'-O-methyl, inverted abasic, phosphorothioate linked ribonucleotides
uuuccauagaucuggaucug

SEQ ID NO: 1551 - RNA, 20 nt, Artificial Sequence
  synthetic polynucleotide
  misc_feature (1)..(20): combination of 2'-fluoro, 2'-O-methyl, inverted abasic, phosphorothioate linked ribonucleotides
ugcuucucagacagcauugg

SEQ ID NO: 1552 - RNA, 20 nt, Artificial Sequence
  synthetic polynucleotide
  misc_feature (1)..(20): combination of 2'-fluoro, 2'-O-methyl, inverted abasic, phosphorothioate linked ribonucleotides
gcuucucagacagcauugga

SEQ ID NO: 1553 - RNA, 20 nt, Artificial Sequence
  synthetic polynucleotide
  misc_feature (1)..(20): combination of 2'-fluoro, 2'-O-methyl, inverted abasic, phosphorothioate linked ribonucleotides
ucagacagcauuggauuucc

SEQ ID NO: 1554 - RNA, 20 nt, Artificial Sequence
  synthetic polynucleotide
  misc_feature (1)..(20): combination of 2'-fluoro, 2'-O-methyl, inverted abasic, phosphorothioate linked ribonucleotides
cagacagcauuggauuuccu

SEQ ID NO: 1555 - RNA, 20 nt, Artificial Sequence
  synthetic polynucleotide
  misc_feature (1)..(20): combination of 2'-fluoro, 2'-O-methyl, inverted abasic, phosphorothioate linked ribonucleotides
agacagcauuggauuuccua

SEQ ID NO: 1556 - RNA, 20 nt, Artificial Sequence
  synthetic polynucleotide
  misc_feature (1)..(20): combination of 2'-fluoro, 2'-O-methyl, inverted abasic, phosphorothioate linked ribonucleotides
uuccuaaaggugcucaggag

SEQ ID NO: 1557 - RNA, 20 nt, Artificial Sequence
  synthetic polynucleotide
  misc_feature (1)..(20): combination of 2'-fluoro, 2'-O-methyl, inverted abasic, phosphorothioate linked ribonucleotides
aggaccccuggauccuugcc

SEQ ID NO: 1558 - RNA, 20 nt, Artificial Sequence
  synthetic polynucleotide
  misc_feature (1)..(20): combination of 2'-fluoro, 2'-O-methyl, inverted abasic, phosphorothioate linked ribonucleotides
cccuggauccuugccauucc

SEQ ID NO: 1559 - RNA, 20 nt, Artificial Sequence
  synthetic polynucleotide
  misc_feature (1)..(20): combination of 2'-fluoro, 2'-O-methyl, inverted abasic, phosphorothioate linked ribonucleotides
cuggauccuugccauucccc

SEQ ID NO: 1560 - RNA, 20 nt, Artificial Sequence
  synthetic polynucleotide
  misc_feature (1)..(20): combination of 2'-fluoro, 2'-O-methyl, inverted abasic, phosphorothioate linked ribonucleotides
ggauccuugccauuccccuc

SEQ ID NO: 1561 - RNA, 20 nt, Artificial Sequence
  synthetic polynucleotide
  misc_feature (1)..(20): combination of 2'-fluoro, 2'-O-methyl, inverted abasic, phosphorothioate linked ribonucleotides
gauccuugccauuccccuca

SEQ ID NO: 1562 - RNA, 20 nt, Artificial Sequence
  synthetic polynucleotide
  misc_feature (1)..(20): combination of 2'-fluoro, 2'-O-methyl, inverted abasic, phosphorothioate linked ribonucleotides
ccuugccauuccccucagcu

SEQ ID NO: 1563 - RNA, 20 nt, Artificial Sequence
  synthetic polynucleotide
  misc_feature (1)..(20): combination of 2'-fluoro, 2'-O-methyl, inverted abasic, phosphorothioate linked ribonucleotides
cuugccauuccccucagcua

SEQ ID NO: 1564 - RNA, 20 nt, Artificial Sequence
  synthetic polynucleotide
  misc_feature (1)..(20): combination of 2'-fluoro, 2'-O-methyl, inverted abasic, phosphorothioate linked ribonucleotides
gccauuccccucagcuaaug

SEQ ID NO: 1565 - RNA, 20 nt, Artificial Sequence
  synthetic polynucleotide
  misc_feature (1)..(20): combination of 2'-fluoro, 2'-O-methyl, inverted abasic, phosphorothioate linked ribonucleotides
cauuccccucagcuaaugac

SEQ ID NO: 1566 - RNA, 20 nt, Artificial Sequence
  synthetic polynucleotide
  misc_feature (1)..(20): combination of 2'-fluoro, 2'-O-methyl, inverted abasic, phosphorothioate linked ribonucleotides
acggagugcuccuucuccag

SEQ ID NO: 1567 - RNA, 20 nt, Artificial Sequence
  synthetic polynucleotide
  misc_feature (1)..(20): combination of 2'-fluoro, 2'-O-methyl, inverted abasic, phosphorothioate linked ribonucleotides
gaaaaccuuuaaagggggaa

SEQ ID NO: 1568 - RNA, 20 nt, Artificial Sequence
  synthetic polynucleotide
  misc_feature (1)..(20): combination of 2'-fluoro, 2'-O-methyl, inverted abasic, phosphorothioate linked ribonucleotides
cauaugucaguuguuuaaaa

SEQ ID NO: 1569 - RNA, 20 nt, Artificial Sequence
  synthetic polynucleotide
  misc_feature (1)..(20): combination of 2'-fluoro, 2'-O-methyl, inverted abasic, phosphorothioate linked ribonucleotides
ucaguuguuuaaaacccaau

SEQ ID NO: 1570 - RNA, 20 nt, Artificial Sequence
  synthetic polynucleotide
  misc_feature (1)..(20): combination of 2'-fluoro, 2'-O-methyl, inverted abasic, phosphorothioate linked ribonucleotides
aguuguuuaaaacccaauau

SEQ ID NO: 1571 - RNA, 20 nt, Artificial Sequence
  synthetic polynucleotide
  misc_feature (1)..(20): combination of 2'-fluoro, 2'-O-methyl, inverted abasic, phosphorothioate linked ribonucleotides
aaggacgcacugcucugauu

SEQ ID NO: 1572 - RNA, 20 nt, Artificial Sequence
  synthetic polynucleotide
  misc_feature (1)..(20): combination of 2'-fluoro, 2'-O-methyl, inverted abasic, phosphorothioate linked ribonucleotides
caagccccgggcuagcuuuu

SEQ ID NO: 1573 - RNA, 20 nt, Artificial Sequence
  synthetic polynucleotide
  misc_feature (1)..(20): combination of 2'-fluoro, 2'-O-methyl, inverted abasic, phosphorothioate linked ribonucleotides
ccccgggcuagcuuuugaaa

SEQ ID NO: 1574 - RNA, 20 nt, Artificial Sequence
  synthetic polynucleotide
  misc_feature (1)..(20): combination of 2'-fluoro, 2'-O-methyl, inverted abasic, phosphorothioate linked ribonucleotides
gacugaggugaccuucagga

SEQ ID NO: 1575 - RNA, 20 nt, Artificial Sequence
  synthetic polynucleotide
  misc_feature (1)..(20): combination of 2'-fluoro, 2'-O-methyl, inverted abasic, phosphorothioate linked ribonucleotides
uauuaauuuuccauagaucu

SEQ ID NO: 1576 - RNA, 20 nt, Artificial Sequence
  synthetic polynucleotide
  misc_feature (1)..(20): combination of 2'-fluoro, 2'-O-methyl, inverted abasic, phosphorothioate linked ribonucleotides
uuuuccauagaucuggaucu

SEQ ID NO: 1577 - RNA, 20 nt, Artificial Sequence
  synthetic polynucleotide
  misc_feature (1)..(20): combination of 2'-fluoro, 2'-O-methyl, inverted abasic, phosphorothioate linked ribonucleotides
uucucagacagcauuggauu

SEQ ID NO: 1578 - RNA, 20 nt, Artificial Sequence
  synthetic polynucleotide
  misc_feature (1)..(20): combination of 2'-fluoro, 2'-O-methyl, inverted abasic, phosphorothioate linked ribonucleotides
uuuccuaaaggugcucagga

SEQ ID NO: 1579 - RNA, 20 nt, Artificial Sequence
  synthetic polynucleotide
  misc_feature (1)..(20): combination of 2'-fluoro, 2'-O-methyl, inverted abasic, phosphorothioate linked ribonucleotides
ccuggauccuugccauuccc

SEQ ID NO: 1580 - RNA, 20 nt, Artificial Sequence
  synthetic polynucleotide
  misc_feature (1)..(20): combination of 2'-fluoro, 2'-O-methyl, inverted abasic, phosphorothioate linked ribonucleotides
uccuugccauuccccucagc

SEQ ID NO: 1581 - RNA, 20 nt, Artificial Sequence
  synthetic polynucleotide
  misc_feature (1)..(20): combination of 2'-fluoro, 2'-O-methyl, inverted abasic, phosphorothioate linked ribonucleotides
ccauuccccucagcuaauga

SEQ ID NO: 1582 - RNA, 20 nt, Artificial Sequence
  synthetic polynucleotide
  misc_feature (1)..(20): combination of 2'-fluoro, 2'-O-methyl, inverted abasic, phosphorothioate linked ribonucleotides
aaaaccuuuaaagggggaaa

SEQ ID NO: 1583 - RNA, 20 nt, Artificial Sequence
  synthetic polynucleotide
  misc_feature (1)..(20): combination of 2'-fluoro, 2'-O-methyl, inverted abasic, phosphorothioate linked ribonucleotides
uuguuuaaaacccaauaucu

SEQ ID NO: 1584 - RNA, 20 nt, Artificial Sequence
  synthetic polynucleotide
  misc_feature (1)..(20): combination of 2'-fluoro, 2'-O-methyl, inverted abasic, phosphorothioate linked ribonucleotides
cucuaagaucugaugaagua

SEQ ID NO: 1585 - RNA, 20 nt, Artificial Sequence
  synthetic polynucleotide
  misc_feature (1)..(20): combination of 2'-fluoro, 2'-O-methyl, inverted abasic, phosphorothioate linked ribonucleotides
cuaagaucugaugaaguaua

SEQ ID NO: 1586 - RNA, 20 nt, Artificial Sequence
  synthetic polynucleotide
  misc_feature (1)..(20): combination of 2'-fluoro, 2'-O-methyl, inverted abasic, phosphorothioate linked ribonucleotides
uaagaucugaugaaguauau

SEQ ID NO: 1587 - RNA, 20 nt, Artificial Sequence
  synthetic polynucleotide
  misc_feature (1)..(20): combination of 2'-fluoro, 2'-O-methyl, inverted abasic, phosphorothioate linked ribonucleotides
aagaucugaugaaguauauu

SEQ ID NO: 1588 - RNA, 20 nt, Artificial Sequence
  synthetic polynucleotide
  misc_feature (1)..(20): combination of 2'-fluoro, 2'-O-methyl, inverted abasic, phosphorothioate linked ribonucleotides
gaugaaguauauuuuuuauu

SEQ ID NO: 1589 - RNA, 20 nt, Artificial Sequence
  synthetic polynucleotide
  misc_feature (1)..(20): combination of 2'-fluoro, 2'-O-methyl, inverted abasic, phosphorothioate linked ribonucleotides
uuuuauugccauuuuguccu

SEQ ID NO: 1590 - RNA, 20 nt, Artificial Sequence
  synthetic polynucleotide
  misc_feature (1)..(20): combination of 2'-fluoro, 2'-O-methyl, inverted abasic, phosphorothioate linked ribonucleotides
uuuauugccauuuuguccuu

SEQ ID NO: 1591 - RNA, 20 nt, Artificial Sequence
  synthetic polynucleotide
  misc_feature (1)..(20): combination of 2'-fluoro, 2'-O-methyl, inverted abasic, phosphorothioate linked ribonucleotides
uuauugccauuuuguccuuu

SEQ ID NO: 1592 - RNA, 20 nt, Artificial Sequence
  synthetic polynucleotide
  misc_feature (1)..(20): combination of 2'-fluoro, 2'-O-methyl, inverted abasic, phosphorothioate linked ribonucleotides
auugccauuuuguccuuuga

SEQ ID NO: 1593 - RNA, 20 nt, Artificial Sequence
  synthetic polynucleotide
  misc_feature (1)..(20): combination of 2'-fluoro, 2'-O-methyl, inverted abasic, phosphorothioate linked ribonucleotides
auauugggaaguugacuaaa

SEQ ID NO: 1594 - RNA, 20 nt, Artificial Sequence
  synthetic polynucleotide
  misc_feature (1)..(20): combination of 2'-fluoro, 2'-O-methyl, inverted abasic, phosphorothioate linked ribonucleotides
ugggaaguugacuaaacuug

SEQ ID NO: 1595 - RNA, 20 nt, Artificial Sequence
  synthetic polynucleotide
  misc_feature (1)..(20): combination of 2'-fluoro, 2'-O-methyl, inverted abasic, phosphorothioate linked ribonucleotides
gggaaguugacuaaacuuga

SEQ ID NO: 1596 - RNA, 20 nt, Artificial Sequence
  synthetic polynucleotide
  misc_feature (1)..(20): combination of 2'-fluoro, 2'-O-methyl, inverted abasic, phosphorothioate linked ribonucleotides
ggaaguugacuaaacuugaa

SEQ ID NO: 1597 - RNA, 20 nt, Artificial Sequence
  synthetic polynucleotide
  misc_feature (1)..(20): combination of 2'-fluoro, 2'-O-methyl, inverted abasic, phosphorothioate linked ribonucleotides
acugugaauaaauggaagcu

SEQ ID NO: 1598 - RNA, 20 nt, Artificial Sequence
  synthetic polynucleotide
  misc_feature (1)..(20): combination of 2'-fluoro, 2'-O-methyl, inverted abasic, phosphorothioate linked ribonucleotides
ugaauaaauggaagcuacuu

SEQ ID NO: 1599 - RNA, 20 nt, Artificial Sequence
  synthetic polynucleotide
  misc_feature (1)..(20): combination of 2'-fluoro, 2'-O-methyl, inverted abasic, phosphorothioate linked ribonucleotides
uaaauggaagcuacuuugac

SEQ ID NO: 1600 - RNA, 20 nt, Artificial Sequence
  synthetic polynucleotide
  misc_feature (1)..(20): combination of 2'-fluoro, 2'-O-methyl, inverted abasic, phosphorothioate linked ribonucleotides
aaauggaagcuacuuugacu

SEQ ID NO: 1601 - RNA, 20 nt, Artificial Sequence
  synthetic polynucleotide
  misc_feature (1)..(20): combination of 2'-fluoro, 2'-O-methyl, inverted abasic, phosphorothioate linked ribonucleotides
aagcuacuuugacuaguuuc

SEQ ID NO: 1602 - RNA, 20 nt, Artificial Sequence
  synthetic polynucleotide
  misc_feature (1)..(20): combination of 2'-fluoro, 2'-O-methyl, inverted abasic, phosphorothioate linked ribonucleotides
agcuacuuugacuaguuuca

SEQ ID NO: 1603 - RNA, 20 nt, Artificial Sequence
  synthetic polynucleotide
  misc_feature (1)..(20): combination of 2'-fluoro, 2'-O-methyl, inverted abasic, phosphorothioate linked ribonucleotides
ggagugcuccuucuccaguu

SEQ ID NO: 1604 - RNA, 20 nt, Artificial Sequence
  synthetic polynucleotide
  misc_feature (1)..(20): combination of 2'-fluoro, 2'-O-methyl, inverted abasic, phosphorothioate linked ribonucleotides
aaccuuuaaagggggaaaag

SEQ ID NO: 1605 - RNA, 20 nt, Artificial Sequence
  synthetic polynucleotide
  misc_feature (1)..(20): combination of 2'-fluoro, 2'-O-methyl, inverted abasic, phosphorothioate linked ribonucleotides
accuuuaaagggggaaaagg

SEQ ID NO: 1606 - RNA, 20 nt, Artificial Sequence
  synthetic polynucleotide
  misc_feature (1)..(20): combination of 2'-fluoro, 2'-O-methyl, inverted abasic, phosphorothioate linked ribonucleotides
uauugccauuuuguccuuug

SEQ ID NO: 1607 - RNA, 20 nt, Artificial Sequence
  synthetic polynucleotide
  misc_feature (1)..(20): combination of 2'-fluoro, 2'-O-methyl, inverted abasic, phosphorothioate linked ribonucleotides
gaaguugacuaaacuugaaa

SEQ ID NO: 1608 - RNA, 20 nt, Artificial Sequence
  synthetic polynucleotide
  misc_feature (1)..(20): combination of 2'-fluoro, 2'-O-methyl, inverted abasic, phosphorothioate linked ribonucleotides
aaguugacuaaacuugaaaa

SEQ ID NO: 1609 - RNA, 20 nt, Artificial Sequence
  synthetic polynucleotide
  misc_feature (1)..(20): combination of 2'-fluoro, 2'-O-methyl, inverted abasic, phosphorothioate linked ribonucleotides
gcuacuuugacuaguuucag

SEQ ID NO: 1610 - RNA, 20 nt, Artificial Sequence
  synthetic polynucleotide
  misc_feature (1)..(20): combination of 2'-fluoro, 2'-O-methyl, inverted abasic, phosphorothioate linked ribonucleotides
ugacucucagugcagccuac

SEQ ID NO: 1611 - RNA, 20 nt, Artificial Sequence
  synthetic polynucleotide
  misc_feature (1)..(20): combination of 2'-fluoro, 2'-O-methyl, inverted abasic, phosphorothioate linked ribonucleotides
acgcccaccacaaaugcagu

SEQ ID NO: 1612 - RNA, 20 nt, Artificial Sequence
  synthetic polynucleotide
  misc_feature (1)..(20): combination of 2'-fluoro, 2'-O-methyl, inverted abasic, phosphorothioate linked ribonucleotides
cccaguggauaaccagcuuc

SEQ ID NO: 1613 - RNA, 20 nt, Artificial Sequence
  synthetic polynucleotide
  misc_feature (1)..(20): combination of 2'-fluoro, 2'-O-methyl, inverted abasic, phosphorothioate linked ribonucleotides
caucaaauagcagacuuguu

SEQ ID NO: 1614 - RNA, 20 nt, Artificial Sequence
  synthetic polynucleotide
  misc_feature (1)..(20): combination of 2'-fluoro, 2'-O-methyl, inverted abasic, phosphorothioate linked ribonucleotides
ucaaauagcagacuuguucc

SEQ ID NO: 1615 - RNA, 20 nt, Artificial Sequence
  synthetic polynucleotide
  misc_feature (1)..(20): combination of 2'-fluoro, 2'-O-methyl, inverted abasic, phosphorothioate linked ribonucleotides
caggcuagagaagaaaguua

SEQ ID NO: 1616 - RNA, 20 nt, Artificial Sequence
  synthetic polynucleotide
  misc_feature (1)..(20): combination of 2'-fluoro, 2'-O-methyl, inverted abasic, phosphorothioate linked ribonucleotides
aggcuagagaagaaaguuaa

SEQ ID NO: 1617 - RNA, 20 nt, Artificial Sequence
  synthetic polynucleotide
  misc_feature (1)..(20): combination of 2'-fluoro, 2'-O-methyl, inverted abasic, phosphorothioate linked ribonucleotides
accaacuucaggcccaauau

SEQ ID NO: 1618 - RNA, 20 nt, Artificial Sequence
  synthetic polynucleotide
  misc_feature (1)..(20): combination of 2'-fluoro, 2'-O-methyl, inverted abasic, phosphorothioate linked ribonucleotides
gagcuucuuauuggugacgu

SEQ ID NO: 1619 - RNA, 20 nt, Artificial Sequence
  synthetic polynucleotide
  misc_feature (1)..(20): combination of 2'-fluoro, 2'-O-methyl, inverted abasic, phosphorothioate linked ribonucleotides
cuucuuauuggugacgugga

SEQ ID NO: 1620 - RNA, 20 nt, Artificial Sequence
  synthetic polynucleotide
  misc_feature (1)..(20): combination of 2'-fluoro, 2'-O-methyl, inverted abasic, phosphorothioate linked ribonucleotides
ucuuauuggugacguggaac

SEQ ID NO: 1621 - RNA, 20 nt, Artificial Sequence
  synthetic polynucleotide
  misc_feature (1)..(20): combination of 2'-fluoro, 2'-O-methyl, inverted abasic, phosphorothioate linked ribonucleotides
auuggugacguggaacugaa

SEQ ID NO: 1622 - RNA, 20 nt, Artificial Sequence
  synthetic polynucleotide
  misc_feature (1)..(20): combination of 2'-fluoro, 2'-O-methyl, inverted abasic, phosphorothioate linked ribonucleotides
cuuguuccagaugcauuuua

SEQ ID NO: 1623 - RNA, 20 nt, Artificial Sequence
  synthetic polynucleotide
  misc_feature (1)..(20): combination of 2'-fluoro, 2'-O-methyl, inverted abasic, phosphorothioate linked ribonucleotides
uguuccagaugcauuuuaac

SEQ ID NO: 1624 - RNA, 20 nt, Artificial Sequence
  synthetic polynucleotide
  misc_feature (1)..(20): combination of 2'-fluoro, 2'-O-methyl, inverted abasic, phosphorothioate linked ribonucleotides
cuggaaacacugaagaguua

SEQ ID NO: 1625 - RNA, 20 nt, Artificial Sequence
  synthetic polynucleotide
  misc_feature (1)..(20): combination of 2'-fluoro, 2'-O-methyl, inverted abasic, phosphorothioate linked ribonucleotides
uggaaacacugaagaguuau

SEQ ID NO: 1626 - RNA, 20 nt, Artificial Sequence
  synthetic polynucleotide
  misc_feature (1)..(20): combination of 2'-fluoro, 2'-O-methyl, inverted abasic, phosphorothioate linked ribonucleotides
aagaguuaucgccaguguga

SEQ ID NO: 1627 - RNA, 20 nt, Artificial Sequence
  synthetic polynucleotide
  misc_feature (1)..(20): combination of 2'-fluoro, 2'-O-methyl, inverted abasic, phosphorothioate linked ribonucleotides
agaguuaucgccagugugac

SEQ ID NO: 1628 - RNA, 20 nt, Artificial Sequence
  synthetic polynucleotide
  misc_feature (1)..(20): combination of 2'-fluoro, 2'-O-methyl, inverted abasic, phosphorothioate linked ribonucleotides
guuauauggaaaaucaccac

SEQ ID NO: 1629 - RNA, 20 nt, Artificial Sequence
  synthetic polynucleotide
gugcuggaaaacccagggac

SEQ ID NO: 1630 - RNA, 20 nt, Artificial Sequence
  synthetic polynucleotide
  misc_feature (1)..(20): combination of 2'-fluoro, 2'-O-methyl, inverted abasic, phosphorothioate linked ribonucleotides
ugcuggaaaacccagggacc

SEQ ID NO: 1631 - RNA, 20 nt, Artificial Sequence
  synthetic polynucleotide
  misc_feature (1)..(20): combination of 2'-fluoro, 2'-O-methyl, inverted abasic, phosphorothioate linked ribonucleotides
gcuggaaaacccagggacca

SEQ ID NO: 1632 - RNA, 20 nt, Artificial Sequence
  synthetic polynucleotide
  misc_feature (1)..(20): combination of 2'-fluoro, 2'-O-methyl, inverted abasic, phosphorothioate linked ribonucleotides
aaaacccagggaccaucaaa

SEQ ID NO: 1633 - RNA, 20 nt, Artificial Sequence
  synthetic polynucleotide
  misc_feature (1)..(20): combination of 2'-fluoro, 2'-O-methyl, inverted abasic, phosphorothioate linked ribonucleotides
aaacccagggaccaucaaag

SEQ ID NO: 1634 - RNA, 20 nt, Artificial Sequence
  synthetic polynucleotide
  misc_feature (1)..(20): combination of 2'-fluoro, 2'-O-methyl, inverted abasic, phosphorothioate linked ribonucleotides
aacccagggaccaucaaagu

SEQ ID NO: 1635 - RNA, 20 nt, Artificial Sequence
  synthetic polynucleotide
  misc_feature (1)..(20): combination of 2'-fluoro, 2'-O-methyl, inverted abasic, phosphorothioate linked ribonucleotides
acccagggaccaucaaagug

SEQ ID NO: 1636 - RNA, 20 nt, Artificial Sequence
  synthetic polynucleotide
  misc_feature (1)..(20): combination of 2'-fluoro, 2'-O-methyl, inverted abasic, phosphorothioate linked ribonucleotides
gugggagacccuguguaccu

SEQ ID NO: 1637 - RNA, 20 nt, Artificial Sequence
  synthetic polynucleotide
  misc_feature (1)..(20): combination of 2'-fluoro, 2'-O-methyl, inverted abasic, phosphorothioate linked ribonucleotides
gcugggccaguaaugggaac

SEQ ID NO: 1638 - RNA, 20 nt, Artificial Sequence
  synthetic polynucleotide
  misc_feature (1)..(20): combination of 2'-fluoro, 2'-O-methyl, inverted abasic, phosphorothioate linked ribonucleotides
caaaaaugacaacacuugaa

SEQ ID NO: 1639 - RNA, 20 nt, Artificial Sequence
  synthetic polynucleotide
  misc_feature (1)..(20): combination of 2'-fluoro, 2'-O-methyl, inverted abasic, phosphorothioate linked ribonucleotides
augacaacacuugaagcaug

SEQ ID NO: 1640 - RNA, 20 nt, Artificial Sequence
  synthetic polynucleotide
  misc_feature (1)..(20): combination of 2'-fluoro, 2'-O-methyl, inverted abasic, phosphorothioate linked ribonucleotides
acuugaagcaugguguuuca

SEQ ID NO: 1641 - RNA, 20 nt, Artificial Sequence
  synthetic polynucleotide
  misc_feature (1)..(20): combination of 2'-fluoro, 2'-O-methyl, inverted abasic, phosphorothioate linked ribonucleotides
aaauuugugauuuucacauu

SEQ ID NO: 1642 - RNA, 20 nt, Artificial Sequence
  synthetic polynucleotide
  misc_feature (1)..(20): combination of 2'-fluoro, 2'-O-methyl, inverted abasic, phosphorothioate linked ribonucleotides
aaugcuucaaugucccagug

SEQ ID NO: 1643 - RNA, 20 nt, Artificial Sequence
  synthetic polynucleotide
  misc_feature (1)..(20): combination of 2'-fluoro, 2'-O-methyl, inverted abasic, phosphorothioate linked ribonucleotides
aaaugacaagacaggauucu

SEQ ID NO: 1644 - RNA, 20 nt, Artificial Sequence
  synthetic polynucleotide
  misc_feature (1)..(20): combination of 2'-fluoro, 2'-O-methyl, inverted abasic, phosphorothioate linked ribonucleotides
uuauggaauaguucuuucuc

SEQ ID NO: 1645 - RNA, 20 nt, Artificial Sequence
  synthetic polynucleotide
  misc_feature (1)..(20): combination of 2'-fluoro, 2'-O-methyl, inverted abasic, phosphorothioate linked ribonucleotides
uauggaauaguucuuucucc

SEQ ID NO: 1646 - RNA, 20 nt, Artificial Sequence
  synthetic polynucleotide
  misc_feature (1)..(20): combination of 2'-fluoro, 2'-O-methyl, inverted abasic, phosphorothioate linked ribonucleotides
gaauaguucuuucuccugcu

SEQ ID NO: 1647 - RNA, 20 nt, Artificial Sequence
  synthetic polynucleotide
  misc_feature (1)..(20): combination of 2'-fluoro, 2'-O-methyl, inverted abasic, phosphorothioate linked ribonucleotides
aauaguucuuucuccugcuu

SEQ ID NO: 1648 - RNA, 20 nt, Artificial Sequence
  synthetic polynucleotide
  misc_feature (1)..(20): combination of 2'-fluoro, 2'-O-methyl, inverted abasic, phosphorothioate linked ribonucleotides
ugcauccugucacuaccacu

SEQ ID NO: 1649 - RNA, 20 nt, Artificial Sequence
  synthetic polynucleotide
  misc_feature (1)..(20): combination of 2'-fluoro, 2'-O-methyl, inverted abasic, phosphorothioate linked ribonucleotides
gcauccugucacuaccacuc

SEQ ID NO: 1650 - RNA, 20 nt, Artificial Sequence
  synthetic polynucleotide
  misc_feature (1)..(20): combination of 2'-fluoro, 2'-O-methyl, inverted abasic, phosphorothioate linked ribonucleotides
ccgggcuagcuuuugaaaug

SEQ ID NO: 1651 - RNA, 20 nt, Artificial Sequence
  synthetic polynucleotide
  misc_feature (1)..(20): combination of 2'-fluoro, 2'-O-methyl, inverted abasic, phosphorothioate linked ribonucleotides
cgggcuagcuuuugaaaugg

SEQ ID NO: 1652 - RNA, 20 nt, Artificial Sequence
  synthetic polynucleotide
  misc_feature (1)..(20): combination of 2'-fluoro, 2'-O-methyl, inverted abasic, phosphorothioate linked ribonucleotides
aagacugaggugaccuucag

SEQ ID NO: 1653 - RNA, 20 nt, Artificial Sequence
  synthetic polynucleotide
  misc_feature (1)..(20): combination of 2'-fluoro, 2'-O-methyl, inverted abasic, phosphorothioate linked ribonucleotides
aggugaccuucaggaagcac

SEQ ID NO: 1654 - RNA, 20 nt, Artificial Sequence
  synthetic polynucleotide
  misc_feature (1)..(20): combination of 2'-fluoro, 2'-O-methyl, inverted abasic, phosphorothioate linked ribonucleotides
ccauagaucuggaucuggcc

SEQ ID NO: 1655 - RNA, 20 nt, Artificial Sequence
  synthetic polynucleotide
  misc_feature (1)..(20): combination of 2'-fluoro, 2'-O-methyl, inverted abasic, phosphorothioate linked ribonucleotides
uggauuuccuaaaggugcuc

SEQ ID NO: 1656 - RNA, 20 nt, Artificial Sequence
  synthetic polynucleotide
  misc_feature (1)..(20): combination of 2'-fluoro, 2'-O-methyl, inverted abasic, phosphorothioate linked ribonucleotides
gauuuccuaaaggugcucag

SEQ ID NO: 1657 - RNA, 20 nt, Artificial Sequence
  synthetic polynucleotide
  misc_feature (1)..(20): combination of 2'-fluoro, 2'-O-methyl, inverted abasic, phosphorothioate linked ribonucleotides
uccuaaaggugcucaggagg

SEQ ID NO: 1658 - RNA, 20 nt, Artificial Sequence
  synthetic polynucleotide
  misc_feature (1)..(20): combination of 2'-fluoro, 2'-O-methyl, inverted abasic, phosphorothioate linked ribonucleotides
uggaggaccccuggauccuu

SEQ ID NO: 1659 - RNA, 20 nt, Artificial Sequence
  synthetic polynucleotide
  misc_feature (1)..(20): combination of 2'-fluoro, 2'-O-methyl, inverted abasic, phosphorothioate linked ribonucleotides
ggaggaccccuggauccuug

SEQ ID NO: 1660 - RNA, 20 nt, Artificial Sequence
  synthetic polynucleotide
  misc_feature (1)..(20): combination of 2'-fluoro, 2'-O-methyl, inverted abasic, phosphorothioate linked ribonucleotides
gaggaccccuggauccuugc

SEQ ID NO: 1661 - RNA, 20 nt, Artificial Sequence
  synthetic polynucleotide
  misc_feature (1)..(20): combination of 2'-fluoro, 2'-O-methyl, inverted abasic, phosphorothioate linked ribonucleotides
cggagugcuccuucuccagu

SEQ ID NO: 1662 - RNA, 20 nt, Artificial Sequence
  synthetic polynucleotide
  misc_feature (1)..(20): combination of 2'-fluoro, 2'-O-methyl, inverted abasic, phosphorothioate linked ribonucleotides
agaaggacgcacugcucuga

SEQ ID NO: 1663 - RNA, 20 nt, Artificial Sequence
  synthetic polynucleotide
  misc_feature (1)..(20): combination of 2'-fluoro, 2'-O-methyl, inverted abasic, phosphorothioate linked ribonucleotides
cucugauuggcccggaaggg

SEQ ID NO: 1664 - RNA, 20 nt, Artificial Sequence
  synthetic polynucleotide
  misc_feature (1)..(20): combination of 2'-fluoro, 2'-O-methyl, inverted abasic, phosphorothioate linked ribonucleotides
ucugauuggcccggaagggu

SEQ ID NO: 1665 - RNA, 20 nt, Artificial Sequence
  synthetic polynucleotide
  misc_feature (1)..(20): combination of 2'-fluoro, 2'-O-methyl, inverted abasic, phosphorothioate linked ribonucleotides
cugauuggcccggaaggguu

SEQ ID NO: 1666 - RNA, 20 nt, Artificial Sequence
  synthetic polynucleotide
  misc_feature (1)..(20): combination of 2'-fluoro, 2'-O-methyl, inverted abasic, phosphorothioate linked ribonucleotides
ggccaaaggccgcaccuucc

SEQ ID NO: 1667 - RNA, 20 nt, Artificial Sequence
  synthetic polynucleotide
  misc_feature (1)..(20): combination of 2'-fluoro, 2'-O-methyl, inverted abasic, phosphorothioate linked ribonucleotides
ccucgcggagaagccagcca

SEQ ID NO: 1668 - RNA, 20 nt, Artificial Sequence
  synthetic polynucleotide
  misc_feature (1)..(20): combination of 2'-fluoro, 2'-O-methyl, inverted abasic, phosphorothioate linked ribonucleotides
ggagaagccagccaugggcg

SEQ ID NO: 1669 - RNA, 20 nt, Artificial Sequence
  synthetic polynucleotide
  misc_feature (1)..(20): combination of 2'-fluoro, 2'-O-methyl, inverted abasic, phosphorothioate linked ribonucleotides
gagaagccagccaugggcgc

SEQ ID NO: 1670 - RNA, 20 nt, Artificial Sequence
  synthetic polynucleotide
  misc_feature (1)..(20): combination of 2'-fluoro, 2'-O-methyl, inverted abasic, phosphorothioate linked ribonucleotides
gaucaaccaggagggaaaca

SEQ ID NO: 1671 - RNA, 20 nt, Artificial Sequence
  synthetic polynucleotide
  misc_feature (1)..(20): combination of 2'-fluoro, 2'-O-methyl, inverted abasic, phosphorothioate linked ribonucleotides
acugcucgccaggaaccucg

SEQ ID NO: 1672 - RNA, 20 nt, Artificial Sequence
  synthetic polynucleotide
  misc_feature (1)..(20): combination of 2'-fluoro, 2'-O-methyl, inverted abasic, phosphorothioate linked ribonucleotides
ucgccaggaaccucgccugg

SEQ ID NO: 1673 - RNA, 20 nt, Artificial Sequence
  synthetic polynucleotide
  misc_feature (1)..(20): combination of 2'-fluoro, 2'-O-methyl, inverted abasic, phosphorothioate linked ribonucleotides
gccaggaaccucgccugguc

SEQ ID NO: 1674 - RNA, 20 nt, Artificial Sequence
  synthetic polynucleotide
  misc_feature (1)..(20): combination of 2'-fluoro, 2'-O-methyl, inverted abasic, phosphorothioate linked ribonucleotides
gaaccucgccugguccugau

SEQ ID NO: 1675 - RNA, 20 nt, Artificial Sequence
  synthetic polynucleotide
  misc_feature (1)..(20): combination of 2'-fluoro, 2'-O-methyl, inverted abasic, phosphorothioate linked ribonucleotides
auggugacacccugacucuc

SEQ ID NO: 1676 - RNA, 20 nt, Artificial Sequence
  synthetic polynucleotide
  misc_feature (1)..(20): combination of 2'-fluoro, 2'-O-methyl, inverted abasic, phosphorothioate linked ribonucleotides
uggugacacccugacucuca

SEQ ID NO: 1677 - RNA, 20 nt, Artificial Sequence
  synthetic polynucleotide
  misc_feature (1)..(20): combination of 2'-fluoro, 2'-O-methyl, inverted abasic, phosphorothioate linked ribonucleotides
gacacccugacucucagugc

SEQ ID NO: 1678 - RNA, 20 nt, Artificial Sequence
  synthetic polynucleotide
  misc_feature (1)..(20): combination of 2'-fluoro, 2'-O-methyl, inverted abasic, phosphorothioate linked ribonucleotides
acccugacucucagugcagc

SEQ ID NO: 1679 - RNA, 20 nt, Artificial Sequence
  synthetic polynucleotide
  misc_feature (1)..(20): combination of 2'-fluoro, 2'-O-methyl, inverted abasic, phosphorothioate linked ribonucleotides
ccgcccaguggauaaccagc

SEQ ID NO: 1680 - RNA, 20 nt, Artificial Sequence
  synthetic polynucleotide
  misc_feature (1)..(20): combination of 2'-fluoro, 2'-O-methyl, inverted abasic, phosphorothioate linked ribonucleotides
ccgccuggugcacuucgagc

SEQ ID NO: 1681 - RNA, 20 nt, Artificial Sequence
  synthetic polynucleotide
  misc_feature (14)..(20): combination of 2'-fluoro, 2'-O-methyl, inverted abasic, phosphorothioate linked ribonucleotides
cgccuggugcacuucgagcc

SEQ ID NO: 1682 - RNA, 20 nt, Artificial Sequence
  synthetic polynucleotide
  misc_feature (1)..(20): combination of 2'-fluoro, 2'-O-methyl, inverted abasic, phosphorothioate linked ribonucleotides
gccuggugcacuucgagccu

SEQ ID NO: 1683 - RNA, 20 nt, Artificial Sequence
  synthetic polynucleotide
  misc_feature (1)..(20): combination of 2'-fluoro, 2'-O-methyl, inverted abasic, phosphorothioate linked ribonucleotides
ccuggugcacuucgagccuc

SEQ ID NO: 1684 - RNA, 20 nt, Artificial Sequence
  synthetic polynucleotide
  misc_feature (1)..(20): combination of 2'-fluoro, 2'-O-methyl, inverted abasic, phosphorothioate linked ribonucleotides
cuggugcacuucgagccuca

SEQ ID NO: 1685 - RNA, 20 nt, Artificial Sequence
  synthetic polynucleotide
  misc_feature (1)..(20): combination of 2'-fluoro, 2'-O-methyl, inverted abasic, phosphorothioate linked ribonucleotides
uggugcacuucgagccucac

SEQ ID NO: 1686 - RNA, 20 nt, Artificial Sequence
  synthetic polynucleotide
  misc_feature (1)..(20): combination of 2'-fluoro, 2'-O-methyl, inverted abasic, phosphorothioate linked ribonucleotides
  misc_feature (1)..(20): combination of 2'-fluoro, 2'-O-methyl, inverted abasic, phosphorothioate linked ribonucleotides
ggugcacuucgagccucaca

SEQ ID NO: 1687 - RNA, 20 nt, Artificial Sequence
  synthetic polynucleotide
  misc_feature (1)..(20): combination of 2'-fluoro, 2'-O-methyl, inverted abasic, phosphorothioate linked ribonucleotides
gugcacuucgagccucacau

SEQ ID NO: 1688 - RNA, 20 nt, Artificial Sequence
  synthetic polynucleotide
  misc_feature (1)..(20): combination of 2'-fluoro, 2'-O-methyl, inverted abasic, phosphorothioate linked ribonucleotides
ugcacuucgagccucacaug

SEQ ID NO: 1689 - RNA, 20 nt, Artificial Sequence
  synthetic polynucleotide
  misc_feature (1)..(20): combination of 2'-fluoro, 2'-O-methyl, inverted abasic, phosphorothioate linked ribonucleotides
gcacuucgagccucacaugc

SEQ ID NO: 1690 - RNA, 20 nt, Artificial Sequence
  synthetic polynucleotide
  misc_feature (1)..(20): combination of 2'-fluoro, 2'-O-methyl, inverted abasic, phosphorothioate linked ribonucleotides
cacuucgagccucacaugcg

SEQ ID NO: 1691 - RNA, 20 nt, Artificial Sequence
  synthetic polynucleotide
  misc_feature (1)..(20): combination of 2'-fluoro, 2'-O-methyl, inverted abasic, phosphorothioate linked ribonucleotides
acuucgagccucacaugcga

SEQ ID NO: 1692 - RNA, 20 nt, Artificial Sequence
  synthetic polynucleotide
  misc_feature (1)..(20): combination of 2'-fluoro, 2'-O-methyl, inverted abasic, phosphorothioate linked ribonucleotides
cuucgagccucacaugcgac

SEQ ID NO: 1693 - RNA, 20 nt, Artificial Sequence
  synthetic polynucleotide
  misc_feature (1)..(20): combination of 2'-fluoro, 2'-O-methyl, inverted abasic, phosphorothioate linked ribonucleotides
uucgagccucacaugcgacc

SEQ ID NO: 1694 - RNA, 20 nt, Artificial Sequence
  synthetic polynucleotide
  misc_feature (1)..(20): combination of 2'-fluoro, 2'-O-methyl, inverted abasic, phosphorothioate linked ribonucleotides
ucgagccucacaugcgaccg

SEQ ID NO: 1695 - RNA, 20 nt, Artificial Sequence
  synthetic polynucleotide
  misc_feature (1)..(20): combination of 2'-fluoro, 2'-O-methyl, inverted abasic, phosphorothioate linked ribonucleotides
cgagccucacaugcgaccga

SEQ ID NO: 1696 - RNA, 20 nt, Artificial Sequence
  synthetic polynucleotide
  misc_feature (1)..(20): combination of 2'-fluoro, 2'-O-methyl, inverted abasic, phosphorothioate linked ribonucleotides
gccucacaugcgaccgagac

SEQ ID NO: 1697 - RNA, 20 nt, Artificial Sequence
  synthetic polynucleotide
  misc_feature (1)..(20): combination of 2'-fluoro, 2'-O-methyl, inverted abasic, phosphorothioate linked ribonucleotides
cuugauccuuucugaggcgu

SEQ ID NO: 1698 - RNA, 20 nt, Artificial Sequence
  synthetic polynucleotide
  misc_feature (1)..(20): combination of 2'-fluoro, 2'-O-methyl, inverted abasic, phosphorothioate linked ribonucleotides
cuggcggaucucaacuccag

SEQ ID NO: 1699 - RNA, 20 nt, Artificial Sequence
  synthetic polynucleotide
  misc_feature (1)..(20): combination of 2'-fluoro, 2'-O-methyl, inverted abasic, phosphorothioate linked ribonucleotides
uggcggaucucaacuccagg

SEQ ID NO: 1700 - RNA, 20 nt, Artificial Sequence
  synthetic polynucleotide
  misc_feature (1)..(20): combination of 2'-fluoro, 2'-O-methyl, inverted abasic, phosphorothioate linked ribonucleotides
gcgaugucuaugcagaggau

SEQ ID NO: 1701 - RNA, 20 nt, Artificial Sequence
  synthetic polynucleotide
  misc_feature (1)..(20): combination of 2'-fluoro, 2'-O-methyl, inverted abasic, phosphorothioate linked ribonucleotides
gaugucuaugcagaggauuc

SEQ ID NO: 1702 - RNA, 20 nt, Artificial Sequence
  synthetic polynucleotide
  misc_feature (1)..(20): combination of 2'-fluoro, 2'-O-methyl, inverted abasic, phosphorothioate linked ribonucleotides
ugucuaugcagaggauucuu

SEQ ID NO: 1703 - RNA, 20 nt, Artificial Sequence
  synthetic polynucleotide
  misc_feature (1)..(20): combination of 2'-fluoro, 2'-O-methyl, inverted abasic, phosphorothioate linked ribonucleotides
gucuaugcagaggauucuug

SEQ ID NO: 1704 - RNA, 20 nt, Artificial Sequence
  synthetic polynucleotide
  misc_feature (1)..(20): combination of 2'-fluoro, 2'-O-methyl, inverted abasic, phosphorothioate linked ribonucleotides
ucuaugcagaggauucuugg

SEQ ID NO: 1705 - RNA, 20 nt, Artificial Sequence
  synthetic polynucleotide
  misc_feature (1)..(20): combination of 2'-fluoro, 2'-O-methyl, inverted abasic, phosphorothioate linked ribonucleotides
cuaugcagaggauucuuggg

SEQ ID NO: 1706 - RNA, 20 nt, Artificial Sequence
  synthetic polynucleotide
  misc_feature (1)..(20): combination of 2'-fluoro, 2'-O-methyl, inverted abasic, phosphorothioate linked ribonucleotides
ggugauggcuuguuccagau

SEQ ID NO: 1707 - RNA, 20 nt, Artificial Sequence
  synthetic polynucleotide
  misc_feature (1)..(20): combination of 2'-fluoro, 2'-O-methyl, inverted abasic, phosphorothioate linked ribonucleotides
gugauggcuuguuccagaug

SEQ ID NO: 1708 - RNA, 20 nt, Artificial Sequence
  synthetic polynucleotide
  misc_feature (1)..(20): combination of 2'-fluoro, 2'-O-methyl, inverted abasic, phosphorothioate linked ribonucleotides
uggcuuguuccagaugcauu

SEQ ID NO: 1709 - RNA, 20 nt, Artificial Sequence
  synthetic polynucleotide
  misc_feature (1)..(20): combination of 2'-fluoro, 2'-O-methyl, inverted abasic, phosphorothioate linked ribonucleotides
cauuuuaaccacaguggacc

SEQ ID NO: 1710 - RNA, 20 nt, Artificial Sequence
  synthetic polynucleotide
  misc_feature (1)..(20): combination of 2'-fluoro, 2'-O-methyl, inverted abasic, phosphorothioate linked ribonucleotides
uuuuaaccacaguggaccca

SEQ ID NO: 1711 - RNA, 20 nt, Artificial Sequence
  synthetic polynucleotide
  misc_feature (1)..(20): combination of 2'-fluoro, 2'-O-methyl, inverted abasic, phosphorothioate linked ribonucleotides
uuuaaccacaguggacccag

SEQ ID NO: 1712 - RNA, 20 nt, Artificial Sequence
  synthetic polynucleotide
  misc_feature (1)..(20): combination of 2'-fluoro, 2'-O-methyl, inverted abasic, phosphorothioate linked ribonucleotides
caccacucuuugggcaguau

SEQ ID NO: 1713 - RNA, 20 nt, Artificial Sequence
  synthetic polynucleotide
  misc_feature (1)..(20): combination of 2'-fluoro, 2'-O-methyl, inverted abasic, phosphorothioate linked ribonucleotides
accacucuuugggcaguauu

SEQ ID NO: 1714 - RNA, 20 nt, Artificial Sequence
  synthetic polynucleotide
  misc_feature (1)..(20): combination of 2'-fluoro, 2'-O-methyl, inverted abasic, phosphorothioate linked ribonucleotides
cuuugggcaguauuuugugc

SEQ ID NO: 1715 - RNA, 20 nt, Artificial Sequence
  synthetic polynucleotide
  misc_feature (1)..(20): combination of 2'-fluoro, 2'-O-methyl, inverted abasic, phosphorothioate linked ribonucleotides
uuugggcaguauuuugugcu

SEQ ID NO: 1716 - RNA, 20 nt, Artificial Sequence
  synthetic polynucleotide
  misc_feature (1)..(20): combination of 2'-fluoro, 2'-O-methyl, inverted abasic, phosphorothioate linked ribonucleotides
uugggcaguauuuugugcug

SEQ ID NO: 1717 - RNA, 20 nt, Artificial Sequence
  synthetic polynucleotide
  misc_feature (1)..(20): combination of 2'-fluoro, 2'-O-methyl, inverted abasic, phosphorothioate linked ribonucleotides
ugggcaguauuuugugcugg

SEQ ID NO: 1718 - RNA, 20 nt, Artificial Sequence
  synthetic polynucleotide
  misc_feature (1)..(20): combination of 2'-fluoro, 2'-O-methyl, inverted abasic, phosphorothioate linked ribonucleotides
ggcaguauuuugugcuggaa

SEQ ID NO: 1719 - RNA, 20 nt, Artificial Sequence
  synthetic polynucleotide
  misc_feature (1)..(20): combination of 2'-fluoro, 2'-O-methyl, inverted abasic, phosphorothioate linked ribonucleotides
uauuuugugcuggaaaaccc

SEQ ID NO: 1720 - RNA, 20 nt, Artificial Sequence
  synthetic polynucleotide
  misc_feature (1)..(20): combination of 2'-fluoro, 2'-O-methyl, inverted abasic, phosphorothioate linked ribonucleotides
auuuugugcuggaaaaccca

SEQ ID NO: 1721 - RNA, 20 nt, Artificial Sequence
  synthetic polynucleotide
  misc_feature (1)..(20): combination of 2'-fluoro, 2'-O-methyl, inverted abasic, phosphorothioate linked ribonucleotides
accguauguccuggaauauu

SEQ ID NO: 1722 - RNA, 20 nt, Artificial Sequence
  synthetic polynucleotide
  misc_feature (1)..(20): combination of 2'-fluoro, 2'-O-methyl, inverted abasic, phosphorothioate linked ribonucleotides
ccguauguccuggaauauua

SEQ ID NO: 1723 - RNA, 20 nt, Artificial Sequence
  synthetic polynucleotide
  misc_feature (1)..(20): combination of 2'-fluoro, 2'-O-methyl, inverted abasic, phosphorothioate linked ribonucleotides
guauguccuggaauauuaga

SEQ ID NO: 1724 - RNA, 20 nt, Artificial Sequence
  synthetic polynucleotide
  misc_feature (1)..(20): combination of 2'-fluoro, 2'-O-methyl, inverted abasic, phosphorothioate linked ribonucleotides
uauguccuggaauauuagau

SEQ ID NO: 1725 - RNA, 20 nt, Artificial Sequence
  synthetic polynucleotide
  misc_feature (1)..(20): ombination of 2'-fluoro, 2'-O-methyl, inverted abasic, phosphorothioate linked ribonucleotides
auguccuggaauauuagaug

SEQ ID NO: 1726 - RNA, 20 nt, Artificial Sequence
  synthetic polynucleotide
  misc_feature (1)..(20): combination of 2'-fluoro, 2'-O-methyl, inverted abasic, phosphorothioate linked ribonucleotides
uguccuggaauauuagaugc

SEQ ID NO: 1727 - RNA, 20 nt, Artificial Sequence
  synthetic polynucleotide
  misc_feature (1)..(20): combination of 2'-fluoro, 2'-O-methyl, inverted abasic, phosphorothioate linked ribonucleotides
guccuggaauauuagaugcc

SEQ ID NO: 1728 - RNA, 20 nt, Artificial Sequence
  synthetic polynucleotide
  misc_feature (1)..(20): combination of 2'-fluoro, 2'-O-methyl, inverted abasic, phosphorothioate linked ribonucleotides
uccuggaauauuagaugccu

SEQ ID NO: 1729 - RNA, 20 nt, Artificial Sequence
  synthetic polynucleotide
  misc_feature (1)..(20): combination of 2'-fluoro, 2'-O-methyl, inverted abasic, phosphorothioate linked ribonucleotides
ccuggaauauuagaugccuu

SEQ ID NO: 1730 - RNA, 20 nt, Artificial Sequence
  synthetic polynucleotide
  misc_feature (1)..(20): combination of 2'-fluoro, 2'-O-methyl, inverted abasic, phosphorothioate linked ribonucleotides
cuggaauauuagaugccuuu

SEQ ID NO: 1731 - RNA, 20 nt, Artificial Sequence
  synthetic polynucleotide
  misc_feature (1)..(20): combination of 2'-fluoro, 2'-O-methyl, inverted abasic, phosphorothioate linked ribonucleotides
caugguguuucagaacugag

SEQ ID NO: 1732 - RNA, 20 nt, Artificial Sequence
  synthetic polynucleotide
  misc_feature (1)..(20): combination of 2'-fluoro, 2'-O-methyl, inverted abasic, phosphorothioate linked ribonucleotides
augguguuucagaacugaga

SEQ ID NO: 1733 - RNA, 20 nt, Artificial Sequence
  synthetic polynucleotide
  misc_feature (1)..(20): combination of 2'-fluoro, 2'-O-methyl, inverted abasic, phosphorothioate linked ribonucleotides
ugguguuucagaacugagac

SEQ ID NO: 1734 - RNA, 20 nt, Artificial Sequence
  synthetic polynucleotide
  misc_feature (1)..(20): combination of 2'-fluoro, 2'-O-methyl, inverted abasic, phosphorothioate linked ribonucleotides
gguguuucagaacugagacc

SEQ ID NO: 1735 - RNA, 20 nt, Artificial Sequence
  synthetic polynucleotide
  misc_feature (1)..(20): combination of 2'-fluoro, 2'-O-methyl, inverted abasic, phosphorothioate linked ribonucleotides
gaggagaagaaaagugauuc

SEQ ID NO: 1736 - RNA, 20 nt, Artificial Sequence
  synthetic polynucleotide
  misc_feature (1)..(20): combination of 2'-fluoro, 2'-O-methyl, inverted abasic, phosphorothioate linked ribonucleotides
agaagaaaagugauucagug

SEQ ID NO: 1737 - RNA, 20 nt, Artificial Sequence
  synthetic polynucleotide
  misc_feature (1)..(20): combination of 2'-fluoro, 2'-O-methyl, inverted abasic, phosphorothioate linked ribonucleotides
gaagaaaagugauucaguga

SEQ ID NO: 1738 - RNA, 20 nt, Artificial Sequence
  synthetic polynucleotide
  misc_feature (1)..(20): combination of 2'-fluoro, 2'-O-methyl, inverted abasic, phosphorothioate linked ribonucleotides
gaaaagugauucagugauuu

SEQ ID NO: 1739 - RNA, 20 nt, Artificial Sequence
  synthetic polynucleotide
  misc_feature (1)..(20): combination of 2'-fluoro, 2'-O-methyl, inverted abasic, phosphorothioate linked ribonucleotides
aaagugauucagugauuuca

SEQ ID NO: 1740 - RNA, 20 nt, Artificial Sequence
  synthetic polynucleotide
  misc_feature (1)..(20): combination of 2'-fluoro, 2'-O-methyl, inverted abasic, phosphorothioate linked ribonucleotides
acuacugaaaaccuuuaaag

SEQ ID NO: 1741 - RNA, 20 nt, Artificial Sequence
  synthetic polynucleotide
  misc_feature (1)..(20): combination of 2'-fluoro, 2'-O-methyl, inverted abasic, phosphorothioate linked ribonucleotides
uacugaaaaccuuuaaaggg

SEQ ID NO: 1742 - RNA, 20 nt, Artificial Sequence
  synthetic polynucleotide
  misc_feature (1)..(20): combination of 2'-fluoro, 2'-O-methyl, inverted abasic, phosphorothioate linked ribonucleotides
uguauaacucuaagaucuga

SEQ ID NO: 1743 - RNA, 20 nt, Artificial Sequence
  synthetic polynucleotide
  misc_feature (1)..(20): combination of 2'-fluoro, 2'-O-methyl, inverted abasic, phosphorothioate linked ribonucleotides
uauaacucuaagaucugaug

SEQ ID NO: 1744 - RNA, 20 nt, Artificial Sequence
  synthetic polynucleotide
  misc_feature (1)..(20): combination of 2'-fluoro, 2'-O-methyl, inverted abasic, phosphorothioate linked ribonucleotides
auaacucuaagaucugauga

SEQ ID NO: 1745 - RNA, 20 nt, Artificial Sequence
  synthetic polynucleotide
  misc_feature (1)..(20): combination of 2'-fluoro, 2'-O-methyl, inverted abasic, phosphorothioate linked ribonucleotides
uaacucuaagaucugaugaa

SEQ ID NO: 1746 - RNA, 20 nt, Artificial Sequence
  synthetic polynucleotide
  misc_feature (1)..(20): combination of 2'-fluoro, 2'-O-methyl, inverted abasic, phosphorothioate linked ribonucleotides
aacucuaagaucugaugaag

SEQ ID NO: 1747 - RNA, 20 nt, Artificial Sequence
  synthetic polynucleotide
  misc_feature (1)..(20): combination of 2'-fluoro, 2'-O-methyl, inverted abasic, phosphorothioate linked ribonucleotides
acucuaagaucugaugaagu

SEQ ID NO: 1748 - RNA, 20 nt, Artificial Sequence
  synthetic polynucleotide
  misc_feature (1)..(20): combination of 2'-fluoro, 2'-O-methyl, inverted abasic, phosphorothioate linked ribonucleotides
gauuggcccggaaggguuca

SEQ ID NO: 1749 - RNA, 20 nt, Artificial Sequence
  synthetic polynucleotide
  misc_feature (1)..(20): combination of 2'-fluoro, 2'-O-methyl, inverted abasic, phosphorothioate linked ribonucleotides
ccuuugggcucggggccaaa

SEQ ID NO: 1750 - RNA, 20 nt, Artificial Sequence
  synthetic polynucleotide
  misc_feature (1)..(20): combination of 2'-fluoro, 2'-O-methyl, inverted abasic, phosphorothioate linked ribonucleotides
uugggcucggggccaaaggc

SEQ ID NO: 1751 - RNA, 20 nt, Artificial Sequence
  synthetic polynucleotide
  misc_feature (1)..(20): combination of 2'-fluoro, 2'-O-methyl, inverted abasic, phosphorothioate linked ribonucleotides
cgcaccuucccccagcggcc

SEQ ID NO: 1752 - RNA, 20 nt, Artificial Sequence
  synthetic polynucleotide
  misc_feature (1)..(20): combination of 2'-fluoro, 2'-O-methyl, inverted abasic, phosphorothioate linked ribonucleotides
ccgccgccaccucgcggaga

SEQ ID NO: 1753 - RNA, 20 nt, Artificial Sequence
  synthetic polynucleotide
  misc_feature (1)..(20): combination of 2'-fluoro, 2'-O-methyl, inverted abasic, phosphorothioate linked ribonucleotides
uccgcgcuggcgcgcuuugu

SEQ ID NO: 1754 - RNA, 20 nt, Artificial Sequence
  synthetic polynucleotide
  misc_feature (1)..(20): combination of 2'-fluoro, 2'-O-methyl, inverted abasic, phosphorothioate linked ribonucleotides
ccgcgcuggcgcgcuuuguc

SEQ ID NO: 1755 - RNA, 20 nt, Artificial Sequence
  synthetic polynucleotide
  misc_feature (1)..(20): combination of 2'-fluoro, 2'-O-methyl, inverted abasic, phosphorothioate linked ribonucleotides
cgcgcuggcgcgcuuugucc

SEQ ID NO: 1756 - RNA, 20 nt, Artificial Sequence
  synthetic polynucleotide
  misc_feature (1)..(20): combination of 2'-fluoro, 2'-O-methyl, inverted abasic, phosphorothioate linked ribonucleotides
cgcgcuuuguccuccucgcg

SEQ ID NO: 1757 - RNA, 20 nt, Artificial Sequence
  synthetic polynucleotide
  misc_feature (1)..(20): combination of 2'-fluoro, 2'-O-methyl, inverted abasic, phosphorothioate linked ribonucleotides
gcgcuuuguccuccucgcgc

SEQ ID NO: 1758 - RNA, 20 nt, Artificial Sequence
  synthetic polynucleotide
  misc_feature (1)..(20): combination of 2'-fluoro, 2'-O-methyl, inverted abasic, phosphorothioate linked ribonucleotides
cgcuuuguccuccucgcgca

SEQ ID NO: 1759 - RNA, 20 nt, Artificial Sequence
  synthetic polynucleotide
  misc_feature (1)..(20): combination of 2'-fluoro, 2'-O-methyl, inverted abasic, phosphorothioate linked ribonucleotides
gcuuuguccuccucgcgcaa

SEQ ID NO: 1760 - RNA, 20 nt, Artificial Sequence
  synthetic polynucleotide
  misc_feature (1)..(20): combination of 2'-fluoro, 2'-O-methyl, inverted abasic, phosphorothioate linked ribonucleotides
cuuuguccuccucgcgcaau

SEQ ID NO: 1761 - RNA, 20 nt, Artificial Sequence
  synthetic polynucleotide
  misc_feature (1)..(20): combination of 2'-fluoro, 2'-O-methyl, inverted abasic, phosphorothioate linked ribonucleotides
uuuguccuccucgcgcaauc

SEQ ID NO: 1762 - RNA, 20 nt, Artificial Sequence
  synthetic polynucleotide
  misc_feature (1)..(20): combination of 2'-fluoro, 2'-O-methyl, inverted abasic, phosphorothioate linked ribonucleotides
uguccuccucgcgcaauccc

SEQ ID NO: 1763 - RNA, 20 nt, Artificial Sequence
  synthetic polynucleotide
  misc_feature (1)..(20): combination of 2'-fluoro, 2'-O-methyl, inverted abasic, phosphorothioate linked ribonucleotides
guccuccucgcgcaaucccg

SEQ ID NO: 1764 - RNA, 20 nt, Artificial Sequence
  synthetic polynucleotide
  misc_feature (1)..(20): combination of 2'-fluoro, 2'-O-methyl, inverted abasic, phosphorothioate linked ribonucleotides
uccuccucgcgcaaucccgg

SEQ ID NO: 1765 - RNA, 20 nt, Artificial Sequence
  synthetic polynucleotide
  misc_feature (1)..(20): combination of 2'-fluoro, 2'-O-methyl, inverted abasic, phosphorothioate linked ribonucleotides
ccuccucgcgcaaucccggc

SEQ ID NO: 1766 - RNA, 20 nt, Artificial Sequence
  synthetic polynucleotide
  misc_feature (1)..(20): combination of 2'-fluoro, 2'-O-methyl, inverted abasic, phosphorothioate linked ribonucleotides
cucgcgcaaucccggcccgg

SEQ ID NO: 1767 - RNA, 20 nt, Artificial Sequence
  synthetic polynucleotide
  misc_feature (1)..(20): combination of 2'-fluoro, 2'-O-methyl, inverted abasic, phosphorothioate linked ribonucleotides
gcgcaaucccggcccgggug

SEQ ID NO: 1768 - RNA, 20 nt, Artificial Sequence
  synthetic polynucleotide
  misc_feature (1)..(20): combination of 2'-fluoro, 2'-O-methyl, inverted abasic, phosphorothioate linked ribonucleotides
cgcaaucccggcccgggugg

SEQ ID NO: 1769 - RNA, 20 nt, Artificial Sequence
  synthetic polynucleotide
  misc_feature (1)..(20): combination of 2'-fluoro, 2'-O-methyl, inverted abasic, phosphorothioate linked ribonucleotides
gcaaucccggcccggguggc

SEQ ID NO: 1770 - RNA, 20 nt, Artificial Sequence
  synthetic polynucleotide
  misc_feature (1)..(20): combination of 2'-fluoro, 2'-O-methyl, inverted abasic, phosphorothioate linked ribonucleotides
ggcccggguggcucgggguu

SEQ ID NO: 1771 - RNA, 20 nt, Artificial Sequence
  synthetic polynucleotide
  misc_feature (1)..(20): combination of 2'-fluoro, 2'-O-methyl, inverted abasic, phosphorothioate linked ribonucleotides
gcccggguggcucgggguug

SEQ ID NO: 1772 - RNA, 20 nt, Artificial Sequence
  synthetic polynucleotide
  misc_feature (1)..(20): combination of 2'-fluoro, 2'-O-methyl, inverted abasic, phosphorothioate linked ribonucleotides
cccggguggcucgggguugc

SEQ ID NO: 1773 - RNA, 20 nt, Artificial Sequence
  synthetic polynucleotide
  misc_feature (1)..(20): combination of 2'-fluoro, 2'-O-methyl, inverted abasic, phosphorothioate linked ribonucleotides
ucgggguugccgcgcugggc

SEQ ID NO: 1774 - RNA, 20 nt, Artificial Sequence
  synthetic polynucleotide
  misc_feature (1)..(20): combination of 2'-fluoro, 2'-O-methyl, inverted abasic, phosphorothioate linked ribonucleotides
gguugccgcgcugggccuga

SEQ ID NO: 1775 - RNA, 20 nt, Artificial Sequence
  synthetic polynucleotide
  misc_feature (1)..(20): combination of 2'-fluoro, 2'-O-methyl, inverted abasic, phosphorothioate linked ribonucleotides
gccgcgcugggccugaccgc

SEQ ID NO: 1776 - RNA, 20 nt, Artificial Sequence
  synthetic polynucleotide
  misc_feature (1)..(20): combination of 2'-fluoro, 2'-O-methyl, inverted abasic, phosphorothioate linked ribonucleotides
gcgcugggccugaccgcggu

SEQ ID NO: 1777 - RNA, 20 nt, Artificial Sequence
  synthetic polynucleotide
  misc_feature (1)..(20): combination of 2'-fluoro, 2'-O-methyl, inverted abasic, phosphorothioate linked ribonucleotides
ugggccugaccgcgguggcg

SEQ ID NO: 1778 - RNA, 20 nt, Artificial Sequence
  synthetic polynucleotide
  misc_feature (1)..(20): combination of 2'-fluoro, 2'-O-methyl, inverted abasic, phosphorothioate linked ribonucleotides
gggccugaccgcgguggcgc

SEQ ID NO: 1779 - RNA, 20 nt, Artificial Sequence
  synthetic polynucleotide
  misc_feature (1)..(20): combination of 2'-fluoro, 2'-O-methyl, inverted abasic, phosphorothioate linked ribonucleotides
gagggaaacaugguuacugc

SEQ ID NO: 1780 - RNA, 20 nt, Artificial Sequence
  synthetic polynucleotide
  misc_feature (1)..(20): combination of 2'-fluoro, 2'-O-methyl, inverted abasic, phosphorothioate linked ribonucleotides
ggaaacaugguuacugcucg

SEQ ID NO: 1781 - RNA, 20 nt, Artificial Sequence
  synthetic polynucleotide
  misc_feature (1)..(20): combination of 2'-fluoro, 2'-O-methyl, inverted abasic, phosphorothioate linked ribonucleotides
gaaacaugguuacugcucgc

SEQ ID NO: 1782 - RNA, 20 nt, Artificial Sequence
  synthetic polynucleotide
  misc_feature (1)..(20): combination of 2'-fluoro, 2'-O-methyl, inverted abasic, phosphorothioate linked ribonucleotides
aaacaugguuacugcucgcc

SEQ ID NO: 1783 - RNA, 20 nt, Artificial Sequence
  synthetic polynucleotide
  misc_feature (1)..(20): combination of 2'-fluoro, 2'-O-methyl, inverted abasic, phosphorothioate linked ribonucleotides
aacaugguuacugcucgcca

SEQ ID NO: 1784 - RNA, 20 nt, Artificial Sequence
  synthetic polynucleotide
  misc_feature (1)..(20): combination of 2'-fluoro, 2'-O-methyl, inverted abasic, phosphorothioate linked ribonucleotides
guuacugcucgccaggaacc

SEQ ID NO: 1785 - RNA, 20 nt, Artificial Sequence
  synthetic polynucleotide
  misc_feature (1)..(20): combination of 2'-fluoro, 2'-O-methyl, inverted abasic, phosphorothioate linked ribonucleotides
guuacugcucgccaggaacc

SEQ ID NO: 1786 - RNA, 20 nt, Artificial Sequence
  synthetic polynucleotide
  misc_feature (1)..(20): combination of 2'-fluoro, 2'-O-methyl, inverted abasic, phosphorothioate linked ribonucleotides
uucccugaccugcgauggug

SEQ ID NO: 1787 - RNA, 20 nt, Artificial Sequence
  synthetic polynucleotide
  misc_feature (1)..(20): combination of 2'-fluoro, 2'-O-methyl, inverted abasic, phosphorothioate linked ribonucleotides
accugcgauggugacacccu

SEQ ID NO: 1788 - RNA, 20 nt, Artificial Sequence
  synthetic polynucleotide
  misc_feature (1)..(20): combination of 2'-fluoro, 2'-O-methyl, inverted abasic, phosphorothioate linked ribonucleotides
gugcagccuacacaaaggac

SEQ ID NO: 1789 - RNA, 20 nt, Artificial Sequence
  synthetic polynucleotide
  misc_feature (1)..(20): combination of 2'-fluoro, 2'-O-methyl, inverted abasic, phosphorothioate linked ribonucleotides
ugcagccuacacaaaggacc

SEQ ID NO: 1790 - RNA, 20 nt, Artificial Sequence
  synthetic polynucleotide
  misc_feature (1)..(20): combination of 2'-fluoro, 2'-O-methyl, inverted abasic, phosphorothioate linked ribonucleotides
cagccuacacaaaggaccua

SEQ ID NO: 1791 - RNA, 20 nt, Artificial Sequence
  synthetic polynucleotide
  misc_feature (1)..(20): combination of 2'-fluoro, 2'-O-methyl, inverted abasic, phosphorothioate linked ribonucleotides
agccuacacaaaggaccuac

SEQ ID NO: 1792 - RNA, 20 nt, Artificial Sequence
  synthetic polynucleotide
  misc_feature (1)..(20): combination of 2'-fluoro, 2'-O-methyl, inverted abasic, phosphorothioate linked ribonucleotides
gccuacacaaaggaccuacu

SEQ ID NO: 1793 - RNA, 20 nt, Artificial Sequence
  synthetic polynucleotide
  misc_feature (1)..(20): combination of 2'-fluoro, 2'-O-methyl, inverted abasic, phosphorothioate linked ribonucleotides
ccuacacaaaggaccuacua

SEQ ID NO: 1794 - RNA, 20 nt, Artificial Sequence
  synthetic polynucleotide
  misc_feature (1)..(20): combination of 2'-fluoro, 2'-O-methyl, inverted abasic, phosphorothioate linked ribonucleotides
cuacacaaaggaccuacuac

SEQ ID NO: 1795 - RNA, 20 nt, Artificial Sequence
  synthetic polynucleotide
  misc_feature (1)..(20): combination of 2'-fluoro, 2'-O-methyl, inverted abasic, phosphorothioate linked ribonucleotides
cacaaaggaccuacuacugc

SEQ ID NO: 1796 - RNA, 20 nt, Artificial Sequence
  synthetic polynucleotide
  misc_feature (1)..(20): combination of 2'-fluoro, 2'-O-methyl, inverted abasic, phosphorothioate linked ribonucleotides
aggaccuacuacugccuauc

SEQ ID NO: 1797 - RNA, 20 nt, Artificial Sequence
  synthetic polynucleotide
  misc_feature (1)..(20): combination of 2'-fluoro, 2'-O-methyl, inverted abasic, phosphorothioate linked ribonucleotides
ggaccuacuacugccuauca

SEQ ID NO: 1798 - RNA, 20 nt, Artificial Sequence
  synthetic polynucleotide
  misc_feature (1)..(20): combination of 2'-fluoro, 2'-O-methyl, inverted abasic, phosphorothioate linked ribonucleotides
accuacuacugccuaucaaa

SEQ ID NO: 1799 - RNA, 20 nt, Artificial Sequence
  synthetic polynucleotide
  misc_feature (1)..(20): combination of 2'-fluoro, 2'-O-methyl, inverted abasic, phosphorothioate linked ribonucleotides
uacuacugccuaucaaaacg

SEQ ID NO: 1800 - RNA, 20 nt, Artificial Sequence
  synthetic polynucleotide
  misc_feature (1)..(20): combination of 2'-fluoro, 2'-O-methyl, inverted abasic, phosphorothioate linked ribonucleotides
cuacugccuaucaaaacgcc

SEQ ID NO: 1801 - RNA, 20 nt, Artificial Sequence
  synthetic polynucleotide
  misc_feature (1)..(20): combination of 2'-fluoro, 2'-O-methyl, inverted abasic, phosphorothioate linked ribonucleotides
gccuaucaaaacgcccacca

SEQ ID NO: 1802 - RNA, 20 nt, Artificial Sequence
  synthetic polynucleotide
  misc_feature (1)..(20): combination of 2'-fluoro, 2'-O-methyl, inverted abasic, phosphorothioate linked ribonucleotides
accacaaaugcagugcacaa

SEQ ID NO: 1803 - RNA, 20 nt, Artificial Sequence
  synthetic polynucleotide
  misc_feature (1)..(20): combination of 2'-fluoro, 2'-O-methyl, inverted abasic, phosphorothioate linked ribonucleotides
cacaaaugcagugcacaagu

SEQ ID NO: 1804 - RNA, 20 nt, Artificial Sequence
  synthetic polynucleotide
  misc_feature (1)..(20): combination of 2'-fluoro, 2'-O-methyl, inverted abasic, phosphorothioate linked ribonucleotides
caaaugcagugcacaagugc

SEQ ID NO: 1805 - RNA, 20 nt, Artificial Sequence
  synthetic polynucleotide
  misc_feature (1)..(20): combination of 2'-fluoro, 2'-O-methyl, inverted abasic, phosphorothioate linked ribonucleotides
augcagugcacaagugcaga

SEQ ID NO: 1806 - RNA, 20 nt, Artificial Sequence
  synthetic polynucleotide
  misc_feature (1)..(20): combination of 2'-fluoro, 2'-O-methyl, inverted abasic, phosphorothioate linked ribonucleotides
agugcacaagugcagagugc

SEQ ID NO: 1807 - RNA, 20 nt, Artificial Sequence
  synthetic polynucleotide
  misc_feature (1)..(20): combination of 2'-fluoro, 2'-O-methyl, inverted abasic, phosphorothioate linked ribonucleotides
acaagugcagagugcacggc

SEQ ID NO: 1808 - RNA, 20 nt, Artificial Sequence
  synthetic polynucleotide
  misc_feature: combination of 2'-fluoro, 2'-O-methyl, inverted abasic, phosphorothioate linked ribonucleotides
caagugcagagugcacggcc

SEQ ID NO: 1809 - RNA, 20 nt, Artificial Sequence
  synthetic polynucleotide
  misc_feature (1)..(20): combination of 2'-fluoro, 2'-O-methyl, inverted abasic, phosphorothioate linked ribonucleotides
ugcagagugcacggccugga

SEQ ID NO: 1810 - RNA, 20 nt, Artificial Sequence
  synthetic polynucleotide
  misc_feature (1)..(20): combination of 2'-fluoro, 2'-O-methyl, inverted abasic, phosphorothioate linked ribonucleotides
agagugcacggccuggagau

SEQ ID NO: 1811 - RNA, 20 nt, Artificial Sequence
  synthetic polynucleotide
  misc_feature (1)..(20): combination of 2'-fluoro, 2'-O-methyl, inverted abasic, phosphorothioate linked ribonucleotides
gagugcacggccuggagaua

SEQ ID NO: 1812 - RNA, 20 nt, Artificial Sequence
  synthetic polynucleotide
  misc_feature (1)..(20): combination of 2'-fluoro, 2'-O-methyl, inverted abasic, phosphorothioate linked ribonucleotides
uggagauagagggcagggac

SEQ ID NO: 1813 - RNA, 20 nt, Artificial Sequence
  synthetic polynucleotide
  misc_feature (1)..(20): combination of 2'-fluoro, 2'-O-methyl, inverted abasic, phosphorothioate linked ribonucleotides
uccugaagucacagcccuac

SEQ ID NO: 1814 - RNA, 20 nt, Artificial Sequence
  synthetic polynucleotide
  misc_feature (1)..(20): combination of 2'-fluoro, 2'-O-methyl, inverted abasic, phosphorothioate linked ribonucleotides
cugaagucacagcccuaccg

SEQ ID NO: 1815 - RNA, 20 nt, Artificial Sequence
  synthetic polynucleotide
  misc_feature (1)..(20): combination of 2'-fluoro, 2'-O-methyl, inverted abasic, phosphorothioate linked ribonucleotides
gaagucacagcccuaccgcc

SEQ ID NO: 1816 - RNA, 20 nt, Artificial Sequence
  synthetic polynucleotide
  misc_feature (1)..(20): combination of 2'-fluoro, 2'-O-methyl, inverted abasic, phosphorothioate linked ribonucleotides
ccucacaugcgaccgagacg

SEQ ID NO: 1817 - RNA, 20 nt, Artificial Sequence
  synthetic polynucleotide
  misc_feature (1)..(20): combination of 2'-fluoro, 2'-O-methyl, inverted abasic, phosphorothioate linked ribonucleotides
cucacaugcgaccgagacgu

SEQ ID NO: 1818 - RNA, 20 nt, Artificial Sequence
  synthetic polynucleotide
  misc_feature (1)..(20): combination of 2'-fluoro, 2'-O-methyl, inverted abasic, phosphorothioate linked ribonucleotides
ucacaugcgaccgagacguc

SEQ ID NO: 1819 - RNA, 20 nt, Artificial Sequence
  synthetic polynucleotide
  misc_feature (1)..(20): combination of 2'-fluoro, 2'-O-methyl, inverted abasic, phosphorothioate linked ribonucleotides
cacaugcgaccgagacgucc

SEQ ID NO: 1820 - RNA, 20 nt, Artificial Sequence
  synthetic polynucleotide
  misc_feature (1)..(20): combination of 2'-fluoro, 2'-O-methyl, inverted abasic, phosphorothioate linked ribonucleotides
acaugcgaccgagacguccu

SEQ ID NO: 1821 - RNA, 20 nt, Artificial Sequence
  synthetic polynucleotide
  misc_feature (1)..(20): combination of 2'-fluoro, 2'-O-methyl, inverted abasic, phosphorothioate linked ribonucleotides
ugcgaccgagacguccucau

SEQ ID NO: 1822 - RNA, 20 nt, Artificial Sequence
  synthetic polynucleotide
  misc_feature (1)..(20): combination of 2'-fluoro, 2'-O-methyl, inverted abasic, phosphorothioate linked ribonucleotides
gcgaccgagacguccucauc

SEQ ID NO: 1823 - RNA, 20 nt, Artificial Sequence
  synthetic polynucleotide
  misc_feature (1)..(20): combination of 2'-fluoro, 2'-O-methyl, inverted abasic, phosphorothioate linked ribonucleotides
ccgagacguccucaucaaau

SEQ ID NO: 1824 - RNA, 20 nt, Artificial Sequence
  synthetic polynucleotide
  misc_feature (1)..(20): combination of 2'-fluoro, 2'-O-methyl, inverted abasic, phosphorothioate linked ribonucleotides
cgagacguccucaucaaaua

SEQ ID NO: 1825 - RNA, 20 nt, Artificial Sequence
  synthetic polynucleotide
  misc_feature (1)..(20): combination of 2'-fluoro, 2'-O-methyl, inverted abasic, phosphorothioate linked ribonucleotides
agacguccucaucaaauagc

SEQ ID NO: 1826 - RNA, 20 nt, Artificial Sequence
  synthetic polynucleotide
  misc_feature (1)..(20): combination of 2'-fluoro, 2'-O-methyl, inverted abasic, phosphorothioate linked ribonucleotides
uccucaucaaauagcagacu

SEQ ID NO: 1827 - RNA, 20 nt, Artificial Sequence
  synthetic polynucleotide
  misc_feature (1)..(20): combination of 2'-fluoro, 2'-O-methyl, inverted abasic, phosphorothioate linked ribonucleotides
cucaucaaauagcagacuug

SEQ ID NO: 1828 - RNA, 20 nt, Artificial Sequence
  synthetic polynucleotide
  misc_feature (1)..(20): combination of 2'-fluoro, 2'-O-methyl, inverted abasic, phosphorothioate linked ribonucleotides
cagacaccagcccauucuug

SEQ ID NO: 1829 - RNA, 20 nt, Artificial Sequence
  synthetic polynucleotide
  misc_feature (1)..(20): combination of 2'-fluoro, 2'-O-methyl, inverted abasic, phosphorothioate linked ribonucleotides
agacaccagcccauucuuga

SEQ ID NO: 1830 - RNA, 20 nt, Artificial Sequence
  synthetic polynucleotide
  misc_feature (1)..(20): combination of 2'-fluoro, 2'-O-methyl, inverted abasic, phosphorothioate linked ribonucleotides
gacaccagcccauucuugau

SEQ ID NO: 1831 - RNA, 20 nt, Artificial Sequence
  synthetic polynucleotide
  misc_feature (1)..(20): combination of 2'-fluoro, 2'-O-methyl, inverted abasic, phosphorothioate linked ribonucleotides
cagcccauucuugauccuuu

SEQ ID NO: 1832 - RNA, 20 nt, Artificial Sequence
  synthetic polynucleotide
  misc_feature (1)..(20): combination of 2'-fluoro, 2'-O-methyl, inverted abasic, phosphorothioate linked ribonucleotides
ccauucuugauccuuucuga

SEQ ID NO: 1833 - RNA, 20 nt, Artificial Sequence
  synthetic polynucleotide
  misc_feature (1)..(20): combination of 2'-fluoro, 2'-O-methyl, inverted abasic, phosphorothioate linked ribonucleotides
gcagaggauucuugggauga

SEQ ID NO: 1834 - RNA, 20 nt, Artificial Sequence
  synthetic polynucleotide
  misc_feature (1)..(20): combination of 2'-fluoro, 2'-O-methyl, inverted abasic, phosphorothioate linked ribonucleotides
auucuugggaugagcuucuu

SEQ ID NO: 1835 - RNA, 20 nt, Artificial Sequence
  synthetic polynucleotide
  misc_feature (1)..(20): combination of 2'-fluoro, 2'-O-methyl, inverted abasic, phosphorothioate linked ribonucleotides
cuugggaugagcuucuuauu

SEQ ID NO: 1836 - RNA, 20 nt, Artificial Sequence
  synthetic polynucleotide
  misc_feature (1)..(20): combination of 2'-fluoro, 2'-O-methyl, inverted abasic, phosphorothioate linked ribonucleotides
gggaugagcuucuuauuggu

SEQ ID NO: 1837 - RNA, 20 nt, Artificial Sequence
  synthetic polynucleotide
  misc_feature (1)..(20): combination of 2'-fluoro, 2'-O-methyl, inverted abasic, phosphorothioate linked ribonucleotides
ggaugagcuucuuauuggug

SEQ ID NO: 1838 - RNA, 20 nt, Artificial Sequence
  synthetic polynucleotide
  misc_feature (1)..(20): combination of 2'-fluoro, 2'-O-methyl, inverted abasic, phosphorothioate linked ribonucleotides
guggaacugaaaagggugau

SEQ ID NO: 1839 - RNA, 20 nt, Artificial Sequence
  synthetic polynucleotide
  misc_feature (1)..(20): combination of 2'-fluoro, 2'-O-methyl, inverted abasic, phosphorothioate linked ribonucleotides
uggaacugaaaagggugaug

SEQ ID NO: 1840 - RNA, 20 nt, Artificial Sequence
  synthetic polynucleotide
  misc_feature (1)..(20): combination of 2'-fluoro, 2'-O-methyl, inverted abasic, phosphorothioate linked ribonucleotides
gaacugaaaagggugauggc

SEQ ID NO: 1841 - RNA, 20 nt, Artificial Sequence
  synthetic polynucleotide
  misc_feature (1)..(20): combination of 2'-fluoro, 2'-O-methyl, inverted abasic, phosphorothioate linked ribonucleotides
cugaaaagggugauggcuug

SEQ ID NO: 1842 - RNA, 20 nt, Artificial Sequence
  synthetic polynucleotide
  misc_feature (1)..(20): combination of 2'-fluoro, 2'-O-methyl, inverted abasic, phosphorothioate linked ribonucleotides
ugaaaagggugauggcuugu

SEQ ID NO: 1843 - RNA, 20 nt, Artificial Sequence
  synthetic polynucleotide
  misc_feature (1)..(20): combination of 2'-fluoro, 2'-O-methyl, inverted abasic, phosphorothioate linked ribonucleotides
gaaaagggugauggcuuguu

SEQ ID NO: 1844 - RNA, 20 nt, Artificial Sequence
  synthetic polynucleotide
  misc_feature (1)..(20): combination of 2'-fluoro, 2'-O-methyl, inverted abasic, phosphorothioate linked ribonucleotides
aaaagggugauggcuuguuc

SEQ ID NO: 1845 - RNA, 20 nt, Artificial Sequence
  synthetic polynucleotide
  misc_feature (1)..(20): combination of 2'-fluoro, 2'-O-methyl, inverted abasic, phosphorothioate linked ribonucleotides
guggacccagacaccggugu

SEQ ID NO: 1846 - RNA, 20 nt, Artificial Sequence
  synthetic polynucleotide
  misc_feature (1)..(20): combination of 2'-fluoro, 2'-O-methyl, inverted abasic, phosphorothioate linked ribonucleotides
uggacccagacaccgguguc

SEQ ID NO: 1847 - RNA, 20 nt, Artificial Sequence
  synthetic polynucleotide
  misc_feature (1)..(20): combination of 2'-fluoro, 2'-O-methyl, inverted abasic, phosphorothioate linked ribonucleotides
ggacccagacaccgguguca

SEQ ID NO: 1848 - RNA, 20 nt, Artificial Sequence
  synthetic polynucleotide
  misc_feature (1)..(20): combination of 2'-fluoro, 2'-O-methyl, inverted abasic, phosphorothioate linked ribonucleotides
acccagacaccggugucaug

SEQ ID NO: 1849 - RNA, 20 nt, Artificial Sequence
  synthetic polynucleotide
  misc_feature (1)..(20): combination of 2'-fluoro, 2'-O-methyl, inverted abasic, phosphorothioate linked ribonucleotides
ccagacaccggugucaugag

SEQ ID NO: 1850 - RNA, 20 nt, Artificial Sequence
  synthetic polynucleotide
  misc_feature (1)..(20): combination of 2'-fluoro, 2'-O-methyl, inverted abasic, phosphorothioate linked ribonucleotides
caccggugucaugagcagga

SEQ ID NO: 1851 - RNA, 20 nt, Artificial Sequence
  synthetic polynucleotide
  misc_feature (1)..(20): combination of 2'-fluoro, 2'-O-methyl, inverted abasic, phosphorothioate linked ribonucleotides
gucaugagcaggaaggaacc

SEQ ID NO: 1852 - RNA, 20 nt, Artificial Sequence
  synthetic polynucleotide
  misc_feature (1)..(20): combination of 2'-fluoro, 2'-O-methyl, inverted abasic, phosphorothioate linked ribonucleotides
augagcaggaaggaaccgcu

SEQ ID NO: 1853 - RNA, 20 nt, Artificial Sequence
  synthetic polynucleotide
  misc_feature (1)..(20): combination of 2'-fluoro, 2'-O-methyl, inverted abasic, phosphorothioate linked ribonucleotides
aggaaggaaccgcuggaaac

SEQ ID NO: 1854 - RNA, 20 nt, Artificial Sequence
  synthetic polynucleotide
  misc_feature (1)..(20): combination of 2'-fluoro, 2'-O-methyl, inverted abasic, phosphorothioate linked ribonucleotides
ggaaggaaccgcuggaaaca

SEQ ID NO: 1855 - RNA, 20 nt, Artificial Sequence
  synthetic polynucleotide
  misc_feature (1)..(20): combination of 2'-fluoro, 2'-O-methyl, inverted abasic, phosphorothioate linked ribonucleotides
gaaggaaccgcuggaaacac

SEQ ID NO: 1856 - RNA, 20 nt, Artificial Sequence
  synthetic polynucleotide
  misc_feature (1)..(20): combination of 2'-fluoro, 2'-O-methyl, inverted abasic, phosphorothioate linked ribonucleotides
cugggccaguaaugggaacc

SEQ ID NO: 1857 - RNA, 20 nt, Artificial Sequence
  synthetic polynucleotide
  misc_feature (1)..(20): combination of 2'-fluoro, 2'-O-methyl, inverted abasic, phosphorothioate linked ribonucleotides
gggccaguaaugggaaccgu

SEQ ID NO: 1858 - RNA, 20 nt, Artificial Sequence
  synthetic polynucleotide
  misc_feature (1)..(20): combination of 2'-fluoro, 2'-O-methyl, inverted abasic, phosphorothioate linked ribonucleotides
ggccaguaaugggaaccgua

SEQ ID NO: 1859 - RNA, 20 nt, Artificial Sequence
  synthetic polynucleotide
  misc_feature (1)..(20): combination of 2'-fluoro, 2'-O-methyl, inverted abasic, phosphorothioate linked ribonucleotides
gccaguaaugggaaccguau

SEQ ID NO: 1860 - RNA, 20 nt, Artificial Sequence
  synthetic polynucleotide
  misc_feature (1)..(20): combination of 2'-fluoro, 2'-O-methyl, inverted abasic, phosphorothioate linked ribonucleotides
ccaguaaugggaaccguaug

SEQ ID NO: 1861 - RNA, 20 nt, Artificial Sequence
  synthetic polynucleotide
  misc_feature (1)..(20): combination of 2'-fluoro, 2'-O-methyl, inverted abasic, phosphorothioate linked ribonucleotides
caguaaugggaaccguaugu

SEQ ID NO: 1862 - RNA, 20 nt, Artificial Sequence
  synthetic polynucleotide
  misc_feature (1)..(20): combination of 2'-fluoro, 2'-O-methyl, inverted abasic, phosphorothioate linked ribonucleotides
aguaaugggaaccguauguc

SEQ ID NO: 1863 - RNA, 20 nt, Artificial Sequence
  synthetic polynucleotide
  misc_feature (1)..(20): combination of 2'-fluoro, 2'-O-methyl, inverted abasic, phosphorothioate linked ribonucleotides
ugggaaccguauguccugga

SEQ ID NO: 1864 - RNA, 20 nt, Artificial Sequence
  synthetic polynucleotide
  misc_feature (1)..(20): combination of 2'-fluoro, 2'-O-methyl, inverted abasic, phosphorothioate linked ribonucleotides
ggaaccguauguccuggaau

SEQ ID NO: 1865 - RNA, 20 nt, Artificial Sequence
  synthetic polynucleotide
  misc_feature (1)..(20): combination of 2'-fluoro, 2'-O-methyl, inverted abasic, phosphorothioate linked ribonucleotides
gaauauuagaugccuuuuaa

SEQ ID NO: 1866 - RNA, 20 nt, Artificial Sequence
  synthetic polynucleotide
  misc_feature (1)..(20): combination of 2'-fluoro, 2'-O-methyl, inverted abasic, phosphorothioate linked ribonucleotides
gaugccuuuuaaaaauguuc

SEQ ID NO: 1867 - RNA, 20 nt, Artificial Sequence
  synthetic polynucleotide
  misc_feature (1)..(20): combination of 2'-fluoro, 2'-O-methyl, inverted abasic, phosphorothioate linked ribonucleotides
guuucagaacugagaccucu

SEQ ID NO: 1868 - RNA, 20 nt, Artificial Sequence
  synthetic polynucleotide
  misc_feature (1)..(20): combination of 2'-fluoro, 2'-O-methyl, inverted abasic, phosphorothioate linked ribonucleotides
ucagaacugagaccucuaca

SEQ ID NO: 1869 - RNA, 20 nt, Artificial Sequence
  synthetic polynucleotide
  misc_feature (1)..(20): combination of 2'-fluoro, 2'-O-methyl, inverted abasic, phosphorothioate linked ribonucleotides
acugagaccucuacauuuuc

SEQ ID NO: 1870 - RNA, 20 nt, Artificial Sequence
  synthetic polynucleotide
  misc_feature (1)..(20): combination of 2'-fluoro, 2'-O-methyl, inverted abasic, phosphorothioate linked ribonucleotides
cugagaccucuacauuuucu

SEQ ID NO: 1871 - RNA, 20 nt, Artificial Sequence
  synthetic polynucleotide
  misc_feature (1)..(20): combination of 2'-fluoro, 2'-O-methyl, inverted abasic, phosphorothioate linked ribonucleotides
ugagaccucuacauuuucuu

SEQ ID NO: 1872 - RNA, 20 nt, Artificial Sequence
  synthetic polynucleotide
  misc_feature (1)..(20): combination of 2'-fluoro, 2'-O-methyl, inverted abasic, phosphorothioate linked ribonucleotides
ugauuuucacauuuuucguc

SEQ ID NO: 1873 - RNA, 20 nt, Artificial Sequence
  synthetic polynucleotide
  misc_feature (1)..(20): combination of 2'-fluoro, 2'-O-methyl, inverted abasic, phosphorothioate linked ribonucleotides
gauuuucacauuuuucgucu

SEQ ID NO: 1874 - RNA, 20 nt, Artificial Sequence
  synthetic polynucleotide
  misc_feature (1)..(20): combination of 2'-fluoro, 2'-O-methyl, inverted abasic, phosphorothioate linked ribonucleotides
auuuucacauuuuucgucuu

SEQ ID NO: 1875 - RNA, 20 nt, Artificial Sequence
  synthetic polynucleotide
  misc_feature (1)..(20): combination of 2'-fluoro, 2'-O-methyl, inverted abasic, phosphorothioate linked ribonucleotides
uuucacauuuuucgucuuuu

SEQ ID NO: 1876 - RNA, 20 nt, Artificial Sequence
  synthetic polynucleotide
  misc_feature (1)..(20): combination of 2'-fluoro, 2'-O-methyl, inverted abasic, phosphorothioate linked ribonucleotides
uucacauuuuucgucuuuug

SEQ ID NO: 1877 - RNA, 20 nt, Artificial Sequence
  synthetic polynucleotide
  misc_feature (1)..(20): combination of 2'-fluoro, 2'-O-methyl, inverted abasic, phosphorothioate linked ribonucleotides
ucacauuuuucgucuuuugg

SEQ ID NO: 1878 - RNA, 20 nt, Artificial Sequence
  synthetic polynucleotide
  misc_feature (1)..(20): combination of 2'-fluoro, 2'-O-methyl, inverted abasic, phosphorothioate linked ribonucleotides
acauuuuucgucuuuuggac

SEQ ID NO: 1879 - RNA, 20 nt, Artificial Sequence
  synthetic polynucleotide
  misc_feature (1)..(20): combination of 2'-fluoro, 2'-O-methyl, inverted abasic, phosphorothioate linked ribonucleotides
uuuucgucuuuuggacuucu

SEQ ID NO: 1880 - RNA, 20 nt, Artificial Sequence
  synthetic polynucleotide
  misc_feature (1)..(20): combination of 2'-fluoro, 2'-O-methyl, inverted abasic, phosphorothioate linked ribonucleotides
uuucgucuuuuggacuucug

SEQ ID NO: 1881 - RNA, 20 nt, Artificial Sequence
  synthetic polynucleotide
  misc_feature (1)..(20): combination of 2'-fluoro, 2'-O-methyl, inverted abasic, phosphorothioate linked ribonucleotides
uucgucuuuuggacuucugg

SEQ ID NO: 1882 - RNA, 20 nt, Artificial Sequence
  synthetic polynucleotide
  misc_feature (1)..(20): combination of 2'-fluoro, 2'-O-methyl, inverted abasic, phosphorothioate linked ribonucleotides
ucgucuuuuggacuucuggu

SEQ ID NO: 1883 - RNA, 20 nt, Artificial Sequence
  synthetic polynucleotide
  misc_feature (1)..(20): combination of 2'-fluoro, 2'-O-methyl, inverted abasic, phosphorothioate linked ribonucleotides
cuuuuggacuucuggugucu

SEQ ID NO: 1884 - RNA, 20 nt, Artificial Sequence
  synthetic polynucleotide
  misc_feature (1)..(20): combination of 2'-fluoro, 2'-O-methyl, inverted abasic, phosphorothioate linked ribonucleotides
uuggacuucuggugucucaa

SEQ ID NO: 1885 - RNA, 20 nt, Artificial Sequence
  synthetic polynucleotide
  misc_feature (1)..(20): combination of 2'-fluoro, 2'-O-methyl, inverted abasic, phosphorothioate linked ribonucleotides
ggacuucuggugucucaaug

SEQ ID NO: 1886 - RNA, 20 nt, Artificial Sequence
  synthetic polynucleotide
  misc_feature (1)..(20): combination of 2'-fluoro, 2'-O-methyl, inverted abasic, phosphorothioate linked ribonucleotides
gacuucuggugucucaaugc

SEQ ID NO: 1887 - RNA, 20 nt, Artificial Sequence
  synthetic polynucleotide
  misc_feature (1)..(20): combination of 2'-fluoro, 2'-O-methyl, inverted abasic, phosphorothioate linked ribonucleotides
uucuggugucucaaugcuuc

SEQ ID NO: 1888 - RNA, 20 nt, Artificial Sequence
  synthetic polynucleotide
  misc_feature (1)..(20): combination of 2'-fluoro, 2'-O-methyl, inverted abasic, phosphorothioate linked ribonucleotides
gcuucaaugucccagugcaa

SEQ ID NO: 1889 - RNA, 20 nt, Artificial Sequence
  synthetic polynucleotide
  misc_feature (1)..(20): combination of 2'-fluoro, 2'-O-methyl, inverted abasic, phosphorothioate linked ribonucleotides
augucccagugcaaaaagua

SEQ ID NO: 1890 - RNA, 20 nt, Artificial Sequence
  synthetic polynucleotide
  misc_feature (1)..(20): combination of 2'-fluoro, 2'-O-methyl, inverted abasic, phosphorothioate linked ribonucleotides
ugucccagugcaaaaaguaa

SEQ ID NO: 1891 - RNA, 20 nt, Artificial Sequence
  synthetic polynucleotide
  misc_feature (1)..(20): combination of 2'-fluoro, 2'-O-methyl, inverted abasic, phosphorothioate linked ribonucleotides
gucccagugcaaaaaguaaa

SEQ ID NO: 1892 - RNA, 20 nt, Artificial Sequence
  synthetic polynucleotide
  misc_feature (1)..(20): combination of 2'-fluoro, 2'-O-methyl, inverted abasic, phosphorothioate linked ribonucleotides
ucccagugcaaaaaguaaag

SEQ ID NO: 1893 - RNA, 20 nt, Artificial Sequence
  synthetic polynucleotide
  misc_feature (1)..(20): combination of 2'-fluoro, 2'-O-methyl, inverted abasic, phosphorothioate linked ribonucleotides
agugcaaaaaguaaagaaau

SEQ ID NO: 1894 - RNA, 20 nt, Artificial Sequence
  synthetic polynucleotide
  misc_feature (1)..(20): combination of 2'-fluoro, 2'-O-methyl, inverted abasic, phosphorothioate linked ribonucleotides
aagaaauauagucucaauaa

SEQ ID NO: 1895 - RNA, 20 nt, Artificial Sequence
  synthetic polynucleotide
  misc_feature (1)..(20): combination of 2'-fluoro, 2'-O-methyl, inverted abasic, phosphorothioate linked ribonucleotides
aaauauagucucaauaacuu

SEQ ID NO: 1896 - RNA, 20 nt, Artificial Sequence
  synthetic polynucleotide
  misc_feature (1)..(20): combination of 2'-fluoro, 2'-O-methyl, inverted abasic, phosphorothioate linked ribonucleotides
auauagucucaauaacuuag

SEQ ID NO: 1897 - RNA, 20 nt, Artificial Sequence
  synthetic polynucleotide
  misc_feature (1)..(20): combination of 2'-fluoro, 2'-O-methyl, inverted abasic, phosphorothioate linked ribonucleotides
uauagucucaauaacuuagu

SEQ ID NO: 1898 - RNA, 20 nt, Artificial Sequence
  synthetic polynucleotide
  misc_feature (1)..(20): combination of 2'-fluoro, 2'-O-methyl, inverted abasic, phosphorothioate linked ribonucleotides
auagucucaauaacuuagua

SEQ ID NO: 1899 - RNA, 20 nt, Artificial Sequence
  synthetic polynucleotide
  misc_feature (1)..(20): combination of 2'-fluoro, 2'-O-methyl, inverted abasic, phosphorothioate linked ribonucleotides
uagucucaauaacuuaguag

SEQ ID NO: 1900 - RNA, 20 nt, Artificial Sequence
  synthetic polynucleotide
  misc_feature (1)..(20): combination of 2'-fluoro, 2'-O-methyl, inverted abasic, phosphorothioate linked ribonucleotides
agucucaauaacuuaguagg

SEQ ID NO: 1901 - RNA, 20 nt, Artificial Sequence
  synthetic polynucleotide
  misc_feature (1)..(20): combination of 2'-fluoro, 2'-O-methyl, inverted abasic, phosphorothioate linked ribonucleotides
ucaauaacuuaguaggacuu

SEQ ID NO: 1902 - RNA, 20 nt, Artificial Sequence
  synthetic polynucleotide
  misc_feature (1)..(20): combination of 2'-fluoro, 2'-O-methyl, inverted abasic, phosphorothioate linked ribonucleotides
caauaacuuaguaggacuuc

SEQ ID NO: 1903 - RNA, 20 nt, Artificial Sequence
  synthetic polynucleotide
  misc_feature (1)..(20): combination of 2'-fluoro, 2'-O-methyl, inverted abasic, phosphorothioate linked ribonucleotides
auaacuuaguaggacuucag

SEQ ID NO: 1904 - RNA, 20 nt, Artificial Sequence
  synthetic polynucleotide
  misc_feature (1)..(20): combination of 2'-fluoro, 2'-O-methyl, inverted abasic, phosphorothioate linked ribonucleotides
aacuuaguaggacuucagua

SEQ ID NO: 1905 - RNA, 20 nt, Artificial Sequence
  synthetic polynucleotide
  misc_feature (1)..(20): combination of 2'-fluoro, 2'-O-methyl, inverted abasic, phosphorothioate linked ribonucleotides
acuuaguaggacuucaguaa

SEQ ID NO: 1906 - RNA, 20 nt, Artificial Sequence
  synthetic polynucleotide
  misc_feature (1)..(20): combination of 2'-fluoro, 2'-O-methyl, inverted abasic, phosphorothioate linked ribonucleotides
uuaguaggacuucaguaagu

SEQ ID NO: 1907 - RNA, 20 nt, Artificial Sequence
  synthetic polynucleotide
  misc_feature (1)..(20): combination of 2'-fluoro, 2'-O-methyl, inverted abasic, phosphorothioate linked ribonucleotides
uaguaggacuucaguaaguc

SEQ ID NO: 1908 - RNA, 20 nt, Artificial Sequence
  synthetic polynucleotide
  misc_feature (1)..(20): combination of 2'-fluoro, 2'-O-methyl, inverted abasic, phosphorothioate linked ribonucleotides
aguaggacuucaguaaguca

SEQ ID NO: 1909 - RNA, 20 nt, Artificial Sequence
  synthetic polynucleotide
  misc_feature (1)..(20): combination of 2'-fluoro, 2'-O-methyl, inverted abasic, phosphorothioate linked ribonucleotides
uaggacuucaguaagucacu

SEQ ID NO: 1910 - RNA, 20 nt, Artificial Sequence
  synthetic polynucleotide
  misc_feature (1)..(20): combination of 2'-fluoro, 2'-O-methyl, inverted abasic, phosphorothioate linked ribonucleotides
uaaaugacaagacaggauuc

SEQ ID NO: 1911 - RNA, 20 nt, Artificial Sequence
  synthetic polynucleotide
  misc_feature (1)..(20): combination of 2'-fluoro, 2'-O-methyl, inverted abasic, phosphorothioate linked ribonucleotides
ggauucugaaaacuccccgu

SEQ ID NO: 1912 - RNA, 20 nt, Artificial Sequence
  synthetic polynucleotide
  misc_feature (1)..(20): combination of 2'-fluoro, 2'-O-methyl, inverted abasic, phosphorothioate linked ribonucleotides
gauucugaaaacuccccguu

SEQ ID NO: 1913 - RNA, 20 nt, Artificial Sequence
  synthetic polynucleotide
  misc_feature (1)..(20): combination of 2'-fluoro, 2'-O-methyl, inverted abasic, phosphorothioate linked ribonucleotides
uucugaaaacuccccguuua

SEQ ID NO: 1914 - RNA, 20 nt, Artificial Sequence
  synthetic polynucleotide
  misc_feature (1)..(20): combination of 2'-fluoro, 2'-O-methyl, inverted abasic, phosphorothioate linked ribonucleotides
ucugaaaacuccccguuuaa

SEQ ID NO: 1915 - RNA, 20 nt, Artificial Sequence
  synthetic polynucleotide
  misc_feature (1)..(20): combination of 2'-fluoro, 2'-O-methyl, inverted abasic, phosphorothioate linked ribonucleotides
cugaaaacuccccguuuaac

SEQ ID NO: 1916 - RNA, 20 nt, Artificial Sequence
  synthetic polynucleotide
  misc_feature (1)..(20): combination of 2'-fluoro, 2'-O-methyl, inverted abasic, phosphorothioate linked ribonucleotides
ugaaaacuccccguuuaacu

SEQ ID NO: 1917 - RNA, 20 nt, Artificial Sequence
  synthetic polynucleotide
  misc_feature (1)..(20): combination of 2'-fluoro, 2'-O-methyl, inverted abasic, phosphorothioate linked ribonucleotides
aaaacuccccguuuaacuga

SEQ ID NO: 1918 - RNA, 20 nt, Artificial Sequence
  synthetic polynucleotide
  misc_feature (1)..(20): combination of 2'-fluoro, 2'-O-methyl, inverted abasic, phosphorothioate linked ribonucleotides
acuccccguuuaacugauua

SEQ ID NO: 1919 - RNA, 20 nt, Artificial Sequence
  synthetic polynucleotide
  misc_feature (1)..(20): combination of 2'-fluoro, 2'-O-methyl, inverted abasic, phosphorothioate linked ribonucleotides
cuccccguuuaacugauuau

SEQ ID NO: 1920 - RNA, 20 nt, Artificial Sequence
  synthetic polynucleotide
  misc_feature (1)..(20): combination of 2'-fluoro, 2'-O-methyl, inverted abasic, phosphorothioate linked ribonucleotides
uccccguuuaacugauuaug

SEQ ID NO: 1921 - RNA, 20 nt, Artificial Sequence
  synthetic polynucleotide
  misc_feature (1)..(20): combination of 2'-fluoro, 2'-O-methyl, inverted abasic, phosphorothioate linked ribonucleotides
ccccguuuaacugauuaugg

SEQ ID NO: 1922 - RNA, 20 nt, Artificial Sequence
  synthetic polynucleotide
  misc_feature (1)..(20): combination of 2'-fluoro, 2'-O-methyl, inverted abasic, phosphorothioate linked ribonucleotides
uucuccugcuucuccguuua

SEQ ID NO: 1923 - RNA, 20 nt, Artificial Sequence
  synthetic polynucleotide
  misc_feature (1)..(20): combination of 2'-fluoro, 2'-O-methyl, inverted abasic, phosphorothioate linked ribonucleotides
ucuccugcuucuccguuuau

SEQ ID NO: 1924 - RNA, 20 nt, Artificial Sequence
  synthetic polynucleotide
  misc_feature (1)..(20): combination of 2'-fluoro, 2'-O-methyl, inverted abasic, phosphorothioate linked ribonucleotides
cuccugcuucuccguuuauc

SEQ ID NO: 1925 - RNA, 20 nt, Artificial Sequence
  synthetic polynucleotide
  misc_feature (1)..(20): combination of 2'-fluoro, 2'-O-methyl, inverted abasic, phosphorothioate linked ribonucleotides
ccugcuucuccguuuaucua

SEQ ID NO: 1926 - RNA, 20 nt, Artificial Sequence
  synthetic polynucleotide
  misc_feature (1)..(20): combination of 2'-fluoro, 2'-O-methyl, inverted abasic, phosphorothioate linked ribonucleotides
gcuucuccguuuaucuacca

SEQ ID NO: 1927 - RNA, 20 nt, Artificial Sequence
  synthetic polynucleotide
  misc_feature (1)..(20): combination of 2'-fluoro, 2'-O-methyl, inverted abasic, phosphorothioate linked ribonucleotides
cuucuccguuuaucuaccaa

SEQ ID NO: 1928 - RNA, 20 nt, Artificial Sequence
  synthetic polynucleotide
  misc_feature (1)..(20): combination of 2'-fluoro, 2'-O-methyl, inverted abasic, phosphorothioate linked ribonucleotides
uucuccguuuaucuaccaag

SEQ ID NO: 1929 - RNA, 20 nt, Artificial Sequence
  synthetic polynucleotide
  misc_feature (1)..(20): combination of 2'-fluoro, 2'-O-methyl, inverted abasic, phosphorothioate linked ribonucleotides
ucuccguuuaucuaccaaga

SEQ ID NO: 1930 - RNA, 20 nt, Artificial Sequence
  synthetic polynucleotide
  misc_feature (1)..(20): combination of 2'-fluoro, 2'-O-methyl, inverted abasic, phosphorothioate linked ribonucleotides
cuccguuuaucuaccaagag

SEQ ID NO: 1931 - RNA, 20 nt, Artificial Sequence
  synthetic polynucleotide
  misc_feature (1)..(20): combination of 2'-fluoro, 2'-O-methyl, inverted abasic, phosphorothioate linked ribonucleotides
uccguuuaucuaccaagagc

SEQ ID NO: 1932 - RNA, 20 nt, Artificial Sequence
  synthetic polynucleotide
  misc_feature (1)..(20): combination of 2'-fluoro, 2'-O-methyl, inverted abasic, phosphorothioate linked ribonucleotides
cguuuaucuaccaagagcgc

SEQ ID NO: 1933 - RNA, 20 nt, Artificial Sequence
  synthetic polynucleotide
  misc_feature (1)..(20): combination of 2'-fluoro, 2'-O-methyl, inverted abasic, phosphorothioate linked ribonucleotides
uuaucuaccaagagcgcaga

SEQ ID NO: 1934 - RNA, 20 nt, Artificial Sequence
  synthetic polynucleotide
  misc_feature (1)..(20): combination of 2'-fluoro, 2'-O-methyl, inverted abasic, phosphorothioate linked ribonucleotides
aucuaccaagagcgcagacu

SEQ ID NO: 1935 - RNA, 20 nt, Artificial Sequence
  synthetic polynucleotide
  misc_feature (1)..(20): combination of 2'-fluoro, 2'-O-methyl, inverted abasic, phosphorothioate linked ribonucleotides
uaccaagagcgcagacuugc

SEQ ID NO: 1936 - RNA, 20 nt, Artificial Sequence
  synthetic polynucleotide
  misc_feature (1)..(20): combination of 2'-fluoro, 2'-O-methyl, inverted abasic, phosphorothioate linked ribonucleotides
accaagagcgcagacuugca

SEQ ID NO: 1937 - RNA, 20 nt, Artificial Sequence
  synthetic polynucleotide
  misc_feature (1)..(20): combination of 2'-fluoro, 2'-O-methyl, inverted abasic, phosphorothioate linked ribonucleotides
caagagcgcagacuugcauc

SEQ ID NO: 1938 - RNA, 20 nt, Artificial Sequence
  synthetic polynucleotide
  misc_feature (1)..(20): combination of 2'-fluoro, 2'-O-methyl, inverted abasic, phosphorothioate linked ribonucleotides
aagagcgcagacuugcaucc

SEQ ID NO: 1939 - RNA, 20 nt, Artificial Sequence
  synthetic polynucleotide
  misc_feature (1)..(20): combination of 2'-fluoro, 2'-O-methyl, inverted abasic, phosphorothioate linked ribonucleotides
gagcgcagacuugcauccug

SEQ ID NO: 1940 - RNA, 20 nt, Artificial Sequence
  synthetic polynucleotide
  misc_feature (1)..(20): combination of 2'-fluoro, 2'-O-methyl, inverted abasic, phosphorothioate linked ribonucleotides
gcgcagacuugcauccuguc

SEQ ID NO: 1941 - RNA, 20 nt, Artificial Sequence
  synthetic polynucleotide
  misc_feature (1)..(20): combination of 2'-fluoro, 2'-O-methyl, inverted abasic, phosphorothioate linked ribonucleotides
cgcagacuugcauccuguca

SEQ ID NO: 1942 - RNA, 20 nt, Artificial Sequence
  synthetic polynucleotide
  misc_feature (1)..(20): combination of 2'-fluoro, 2'-O-methyl, inverted abasic, phosphorothioate linked ribonucleotides
cagacuugcauccugucacu

SEQ ID NO: 1943 - RNA, 20 nt, Artificial Sequence
  synthetic polynucleotide
  misc_feature (1)..(20): combination of 2'-fluoro, 2'-O-methyl, inverted abasic, phosphorothioate linked ribonucleotides
cuugcauccugucacuacca

SEQ ID NO: 1944 - RNA, 20 nt, Artificial Sequence
  synthetic polynucleotide
  misc_feature (1)..(20): combination of 2'-fluoro, 2'-O-methyl, inverted abasic, phosphorothioate linked ribonucleotides
cauccugucacuaccacucg

SEQ ID NO: 1945 - RNA, 20 nt, Artificial Sequence
  synthetic polynucleotide
  misc_feature (1)..(20): combination of 2'-fluoro, 2'-O-methyl, inverted abasic, phosphorothioate linked ribonucleotides
uccugucacuaccacucguu

SEQ ID NO: 1946 - RNA, 20 nt, Artificial Sequence
  synthetic polynucleotide
  misc_feature (1)..(20): combination of 2'-fluoro, 2'-O-methyl, inverted abasic, phosphorothioate linked ribonucleotides
ccugucacuaccacucguua

SEQ ID NO: 1947 - RNA, 20 nt, Artificial Sequence
  synthetic polynucleotide
  misc_feature (1)..(20): combination of 2'-fluoro, 2'-O-methyl, inverted abasic, phosphorothioate linked ribonucleotides
cugucacuaccacucguuag

SEQ ID NO: 1948 - RNA, 20 nt, Artificial Sequence
  synthetic polynucleotide
  misc_feature (1)..(20): combination of 2'-fluoro, 2'-O-methyl, inverted abasic, phosphorothioate linked ribonucleotides
ugucacuaccacucguuaga

SEQ ID NO: 1949 - RNA, 20 nt, Artificial Sequence
  synthetic polynucleotide
  misc_feature (1)..(20): combination of 2'-fluoro, 2'-O-methyl, inverted abasic, phosphorothioate linked ribonucleotides
acuaccacucguuagagaaa

SEQ ID NO: 1950 - RNA, 20 nt, Artificial Sequence
  synthetic polynucleotide
  misc_feature (1)..(20): combination of 2'-fluoro, 2'-O-methyl, inverted abasic, phosphorothioate linked ribonucleotides
aagagugggugggcuggaag

SEQ ID NO: 1951 - RNA, 20 nt, Artificial Sequence
  synthetic polynucleotide
  misc_feature (1)..(20): combination of 2'-fluoro, 2'-O-methyl, inverted abasic, phosphorothioate linked ribonucleotides
uccuagaauguguuauugcc

SEQ ID NO: 1952 - RNA, 20 nt, Artificial Sequence
  synthetic polynucleotide
  misc_feature (1)..(20): combination of 2'-fluoro, 2'-O-methyl, inverted abasic, phosphorothioate linked ribonucleotides
ccuagaauguguuauugccc

SEQ ID NO: 1953 - RNA, 20 nt, Artificial Sequence
  synthetic polynucleotide
  misc_feature (1)..(20): combination of 2'-fluoro, 2'-O-methyl, inverted abasic, phosphorothioate linked ribonucleotides
aauguguuauugccccuguu

SEQ ID NO: 1954 - RNA, 20 nt, Artificial Sequence
  synthetic polynucleotide
  misc_feature (1)..(20): combination of 2'-fluoro, 2'-O-methyl, inverted abasic, phosphorothioate linked ribonucleotides
guguuauugccccuguucau

SEQ ID NO: 1955 - RNA, 20 nt, Artificial Sequence
  synthetic polynucleotide
  misc_feature (1)..(20): combination of 2'-fluoro, 2'-O-methyl, inverted abasic, phosphorothioate linked ribonucleotides
uuauugccccuguucaugag

SEQ ID NO: 1956 - RNA, 20 nt, Artificial Sequence
  synthetic polynucleotide
  misc_feature (1)..(20): combination of 2'-fluoro, 2'-O-methyl, inverted abasic, phosphorothioate linked ribonucleotides
auugccccuguucaugaggu

SEQ ID NO: 1957 - RNA, 20 nt, Artificial Sequence
  synthetic polynucleotide
  misc_feature (1)..(20): combination of 2'-fluoro, 2'-O-methyl, inverted abasic, phosphorothioate linked ribonucleotides
aaugaaaauuaaauugcacc

SEQ ID NO: 1958 - RNA, 20 nt, Artificial Sequence
  synthetic polynucleotide
  misc_feature (1)..(20): combination of 2'-fluoro, 2'-O-methyl, inverted abasic, phosphorothioate linked ribonucleotides
augaaaauuaaauugcaccc

SEQ ID NO: 1959 - RNA, 20 nt, Artificial Sequence
  synthetic polynucleotide
  misc_feature (1)..(20): combination of 2'-fluoro, 2'-O-methyl, inverted abasic, phosphorothioate linked ribonucleotides
aaauuaaauugcaccccaaa

SEQ ID NO: 1960 - RNA, 20 nt, Artificial Sequence
  synthetic polynucleotide
  misc_feature (1)..(20): combination of 2'-fluoro, 2'-O-methyl, inverted abasic, phosphorothioate linked ribonucleotides
auuaaauugcaccccaaaua

SEQ ID NO: 1961 - RNA, 20 nt, Artificial Sequence
  synthetic polynucleotide
  misc_feature (1)..(20): combination of 2'-fluoro, 2'-O-methyl, inverted abasic, phosphorothioate linked ribonucleotides
uuaaauugcaccccaaauau

SEQ ID NO: 1962 - RNA, 20 nt, Artificial Sequence
  synthetic polynucleotide
  misc_feature (1)..(20): combination of 2'-fluoro, 2'-O-methyl, inverted abasic, phosphorothioate linked ribonucleotides
aauugcaccccaaauauggc

SEQ ID NO: 1963 - RNA, 20 nt, Artificial Sequence
  synthetic polynucleotide
  misc_feature (1)..(20): combination of 2'-fluoro, 2'-O-methyl, inverted abasic, phosphorothioate linked ribonucleotides
auugcaccccaaauauggcu

SEQ ID NO: 1964 - RNA, 20 nt, Artificial Sequence
  synthetic polynucleotide
  misc_feature (1)..(20): combination of 2'-fluoro, 2'-O-methyl, inverted abasic, phosphorothioate linked ribonucleotides
auauggcuggaaugccacuu

SEQ ID NO: 1965 - RNA, 20 nt, Artificial Sequence
  synthetic polynucleotide
  misc_feature (1)..(20): combination of 2'-fluoro, 2'-O-methyl, inverted abasic, phosphorothioate linked ribonucleotides
uggaaugccacuucccuuuu

SEQ ID NO: 1966 - RNA, 20 nt, Artificial Sequence
  synthetic polynucleotide
  misc_feature (1)..(20): combination of 2'-fluoro, 2'-O-methyl, inverted abasic, phosphorothioate linked ribonucleotides
uucccuuuucuucucaagcc

SEQ ID NO: 1967 - RNA, 20 nt, Artificial Sequence
  synthetic polynucleotide
  misc_feature (1)..(20): combination of 2'-fluoro, 2'-O-methyl, inverted abasic, phosphorothioate linked ribonucleotides
ucuucucaagccccgggcua

SEQ ID NO: 1968 - RNA, 20 nt, Artificial Sequence
  synthetic polynucleotide
  misc_feature (1)..(20): combination of 2'-fluoro, 2'-O-methyl, inverted abasic, phosphorothioate linked ribonucleotides
ucucaagccccgggcuagcu

SEQ ID NO: 1969 - RNA, 20 nt, Artificial Sequence
  synthetic polynucleotide
  misc_feature (1)..(20): combination of 2'-fluoro, 2'-O-methyl, inverted abasic, phosphorothioate linked ribonucleotides
gcuuuugaaauggcauaaag

SEQ ID NO: 1970 - RNA, 20 nt, Artificial Sequence
  synthetic polynucleotide
  misc_feature (1)..(20): combination of 2'-fluoro, 2'-O-methyl, inverted abasic, phosphorothioate linked ribonucleotides
uuugaaauggcauaaagacu

SEQ ID NO: 1971 - RNA, 20 nt, Artificial Sequence
  synthetic polynucleotide
  misc_feature (1)..(20): combination of 2'-fluoro, 2'-O-methyl, inverted abasic, phosphorothioate linked ribonucleotides
aauggcauaaagacugaggu

SEQ ID NO: 1972 - RNA, 20 nt, Artificial Sequence
  synthetic polynucleotide
  misc_feature (1)..(20): combination of 2'-fluoro, 2'-O-methyl, inverted abasic, phosphorothioate linked ribonucleotides
uggcauaaagacugagguga

SEQ ID NO: 1973 - RNA, 20 nt, Artificial Sequence
  synthetic polynucleotide
  misc_feature (1)..(20): combination of 2'-fluoro, 2'-O-methyl, inverted abasic, phosphorothioate linked ribonucleotides
gcauaaagacugaggugacc

SEQ ID NO: 1974 - RNA, 20 nt, Artificial Sequence
  synthetic polynucleotide
  misc_feature (1)..(20): combination of 2'-fluoro, 2'-O-methyl, inverted abasic, phosphorothioate linked ribonucleotides
gaagcacugcagauauuaau

SEQ ID NO: 1975 - RNA, 20 nt, Artificial Sequence
  synthetic polynucleotide
  misc_feature (1)..(20): combination of 2'-fluoro, 2'-O-methyl, inverted abasic, phosphorothioate linked ribonucleotides
cuaaaggugcucaggaggau

SEQ ID NO: 1976 - RNA, 20 nt, Artificial Sequence
  synthetic polynucleotide
  misc_feature (1)..(20): combination of 2'-fluoro, 2'-O-methyl, inverted abasic, phosphorothioate linked ribonucleotides
aggugcucaggaggaugguu

SEQ ID NO: 1977 - RNA, 20 nt, Artificial Sequence
  synthetic polynucleotide
  misc_feature (1)..(20): combination of 2'-fluoro, 2'-O-methyl, inverted abasic, phosphorothioate linked ribonucleotides
gugcucaggaggaugguugu

SEQ ID NO: 1978 - RNA, 20 nt, Artificial Sequence
  synthetic polynucleotide
  misc_feature (1)..(20): combination of 2'-fluoro, 2'-O-methyl, inverted abasic, phosphorothioate linked ribonucleotides
gaggaugguuguguagucau

SEQ ID NO: 1979 - RNA, 20 nt, Artificial Sequence
  synthetic polynucleotide
  misc_feature (1)..(20): combination of 2'-fluoro, 2'-O-methyl, inverted abasic, phosphorothioate linked ribonucleotides
aggaugguuguguagucaug

SEQ ID NO: 1980 - RNA, 20 nt, Artificial Sequence
  synthetic polynucleotide
  misc_feature (1)..(20): combination of 2'-fluoro, 2'-O-methyl, inverted abasic, phosphorothioate linked ribonucleotides
ggaugguuguguagucaugg

SEQ ID NO: 1981 - RNA, 20 nt, Artificial Sequence
  synthetic polynucleotide
  misc_feature (1)..(20): combination of 2'-fluoro, 2'-O-methyl, inverted abasic, phosphorothioate linked ribonucleotides
uuguguagucauggaggacc

SEQ ID NO: 1982 - RNA, 20 nt, Artificial Sequence
  synthetic polynucleotide
  misc_feature (1)..(20): combination of 2'-fluoro, 2'-O-methyl, inverted abasic, phosphorothioate linked ribonucleotides
ucauggaggaccccuggauc

SEQ ID NO: 1983 - RNA, 20 nt, Artificial Sequence
  synthetic polynucleotide
  misc_feature (1)..(20): combination of 2'-fluoro, 2'-O-methyl, inverted abasic, phosphorothioate linked ribonucleotides
auuccccucagcuaaugacg

SEQ ID NO: 1984 - RNA, 20 nt, Artificial Sequence
  synthetic polynucleotide
  misc_feature (1)..(20): combination of 2'-fluoro, 2'-O-methyl, inverted abasic, phosphorothioate linked ribonucleotides
uuccccucagcuaaugacgg

SEQ ID NO: 1985 - RNA, 20 nt, Artificial Sequence
  synthetic polynucleotide
  misc_feature (1)..(20): combination of 2'-fluoro, 2'-O-methyl, inverted abasic, phosphorothioate linked ribonucleotides
uccccucagcuaaugacgga

SEQ ID NO: 1986 - RNA, 20 nt, Artificial Sequence
  synthetic polynucleotide
  misc_feature (1)..(20): combination of 2'-fluoro, 2'-O-methyl, inverted abasic, phosphorothioate linked ribonucleotides
ucagcuaaugacggagugcu

SEQ ID NO: 1987 - RNA, 20 nt, Artificial Sequence
  synthetic polynucleotide
  misc_feature (1)..(20): combination of 2'-fluoro, 2'-O-methyl, inverted abasic, phosphorothioate linked ribonucleotides
gaaaaaguucugaauucugu

SEQ ID NO: 1988 - RNA, 20 nt, Artificial Sequence
  synthetic polynucleotide
  misc_feature (1)..(20): combination of 2'-fluoro, 2'-O-methyl, inverted abasic, phosphorothioate linked ribonucleotides
aguucugaauucuguggagg

SEQ ID NO: 1989 - RNA, 20 nt, Artificial Sequence
  synthetic polynucleotide
  misc_feature (1)..(20): combination of 2'-fluoro, 2'-O-methyl, inverted abasic, phosphorothioate linked ribonucleotides
agugauuucagauagacuac

SEQ ID NO: 1990 - RNA, 20 nt, Artificial Sequence
  synthetic polynucleotide
  misc_feature (1)..(20): combination of 2'-fluoro, 2'-O-methyl, inverted abasic, phosphorothioate linked ribonucleotides
auuucagauagacuacugaa

SEQ ID NO: 1991 - RNA, 20 nt, Artificial Sequence
  synthetic polynucleotide
  misc_feature (1)..(20): combination of 2'-fluoro, 2'-O-methyl, inverted abasic, phosphorothioate linked ribonucleotides
cagauagacuacugaaaacc

SEQ ID NO: 1992 - RNA, 20 nt, Artificial Sequence
  synthetic polynucleotide
  misc_feature (1)..(20): combination of 2'-fluoro, 2'-O-methyl, inverted abasic, phosphorothioate linked ribonucleotides
uagacuacugaaaaccuuua

SEQ ID NO: 1993 - RNA, 20 nt, Artificial Sequence
  synthetic polynucleotide
  misc_feature (1)..(20): combination of 2'-fluoro, 2'-O-methyl, inverted abasic, phosphorothioate linked ribonucleotides
agacuacugaaaaccuuuaa

SEQ ID NO: 1994 - RNA, 20 nt, Artificial Sequence
  synthetic polynucleotide
  misc_feature (1)..(20): combination of 2'-fluoro, 2'-O-methyl, inverted abasic, phosphorothioate linked ribonucleotides
aaggaaagcauaugucaguu

SEQ ID NO: 1995 - RNA, 20 nt, Artificial Sequence
  synthetic polynucleotide
  misc_feature (1)..(20): combination of 2'-fluoro, 2'-O-methyl, inverted abasic, phosphorothioate linked ribonucleotides
aggaaagcauaugucaguug

SEQ ID NO: 1996 - RNA, 20 nt, Artificial Sequence
  synthetic polynucleotide
  misc_feature (1)..(20): combination of 2'-fluoro, 2'-O-methyl, inverted abasic, phosphorothioate linked ribonucleotides
ggaaagcauaugucaguugu

SEQ ID NO: 1997 - RNA, 20 nt, Artificial Sequence
  synthetic polynucleotide
  misc_feature (1)..(20): combination of 2'-fluoro, 2'-O-methyl, inverted abasic, phosphorothioate linked ribonucleotides
aaagcauaugucaguuguuu

SEQ ID NO: 1998 - RNA, 20 nt, Artificial Sequence
  synthetic polynucleotide
  misc_feature (1)..(20): combination of 2'-fluoro, 2'-O-methyl, inverted abasic, phosphorothioate linked ribonucleotides
aagcauaugucaguuguuua

SEQ ID NO: 1999 - RNA, 20 nt, Artificial Sequence
  synthetic polynucleotide
  misc_feature (1)..(20): combination of 2'-fluoro, 2'-O-methyl, inverted abasic, phosphorothioate linked ribonucleotides
agcauaugucaguuguuuaa

SEQ ID NO: 2000 - RNA, 20 nt, Artificial Sequence
  synthetic polynucleotide
  misc_feature (1)..(20): combination of 2'-fluoro, 2'-O-methyl, inverted abasic, phosphorothioate linked ribonucleotides
uaaaacccaauaucuauuuu

SEQ ID NO: 2001 - RNA, 20 nt, Artificial Sequence
  synthetic polynucleotide
  misc_feature (1)..(20): combination of 2'-fluoro, 2'-O-methyl, inverted abasic, phosphorothioate linked ribonucleotides
aacccaauaucuauuuuuua

SEQ ID NO: 2002 - RNA, 20 nt, Artificial Sequence
  synthetic polynucleotide
  misc_feature (1)..(20): combination of 2'-fluoro, 2'-O-methyl, inverted abasic, phosphorothioate linked ribonucleotides
uuaacugauuguauaacucu

SEQ ID NO: 2003 - RNA, 20 nt, Artificial Sequence
  synthetic polynucleotide
  misc_feature (1)..(20): combination of 2'-fluoro, 2'-O-methyl, inverted abasic, phosphorothioate linked ribonucleotides
uaacugauuguauaacucua

SEQ ID NO: 2004 - RNA, 20 nt, Artificial Sequence
  synthetic polynucleotide
  misc_feature (1)..(20): combination of 2'-fluoro, 2'-O-methyl, inverted abasic, phosphorothioate linked ribonucleotides
acugauuguauaacucuaag

SEQ ID NO: 2005 - RNA, 20 nt, Artificial Sequence
  synthetic polynucleotide
  misc_feature (1)..(20): combination of 2'-fluoro, 2'-O-methyl, inverted abasic, phosphorothioate linked ribonucleotides
cugauuguauaacucuaaga

SEQ ID NO: 2006 - RNA, 20 nt, Artificial Sequence
  synthetic polynucleotide
  misc_feature (1)..(20): combination of 2'-fluoro, 2'-O-methyl, inverted abasic, phosphorothioate linked ribonucleotides
gauuguauaacucuaagauc

SEQ ID NO: 2007 - RNA, 20 nt, Artificial Sequence
  synthetic polynucleotide
  misc_feature (1)..(20): combination of 2'-fluoro, 2'-O-methyl, inverted abasic, phosphorothioate linked ribonucleotides
gccauuuuguccuuugauua

SEQ ID NO: 2008 - RNA, 20 nt, Artificial Sequence
  synthetic polynucleotide
  misc_feature (1)..(20): combination of 2'-fluoro, 2'-O-methyl, inverted abasic, phosphorothioate linked ribonucleotides
uguccuuugauuauauuggg

SEQ ID NO: 2009 - RNA, 20 nt, Artificial Sequence
  synthetic polynucleotide
  misc_feature (1)..(20): combination of 2'-fluoro, 2'-O-methyl, inverted abasic, phosphorothioate linked ribonucleotides
aggcccaauauuguaauuuc

SEQ ID NO: 2010 - RNA, 20 nt, Artificial Sequence
  synthetic polynucleotide
  misc_feature (1)..(20): combination of 2'-fluoro, 2'-O-methyl, inverted abasic, phosphorothioate linked ribonucleotides
cagaacgaaaguuauaugga

SEQ ID NO: 2011 - RNA, 20 nt, Artificial Sequence
  synthetic polynucleotide
  misc_feature (1)..(20): combination of 2'-fluoro, 2'-O-methyl, inverted abasic, phosphorothioate linked ribonucleotides
uuccagaugcauuuuaacca

SEQ ID NO: 2012 - RNA, 20 nt, Artificial Sequence
  synthetic polynucleotide
  misc_feature (1)..(20): combination of 2'-fluoro, 2'-O-methyl, inverted abasic, phosphorothioate linked ribonucleotides
ugcauuuuaaccacagugga

SEQ ID NO: 2013 - RNA, 20 nt, Artificial Sequence
  synthetic polynucleotide
  misc_feature (1)..(20): combination of 2'-fluoro, 2'-O-methyl, inverted abasic, phosphorothioate linked ribonucleotides
ccaguggauaaccagcuucc

SEQ ID NO: 2014 - RNA, 20 nt, Artificial Sequence
  synthetic polynucleotide
  misc_feature (1)..(20): combination of 2'-fluoro, 2'-O-methyl, inverted abasic, phosphorothioate linked ribonucleotides
gcuggaaacacugaagaguu

SEQ ID NO: 2015 - RNA, 20 nt, Artificial Sequence
  synthetic polynucleotide
  misc_feature (1)..(20): combination of 2'-fluoro, 2'-O-methyl, inverted abasic, phosphorothioate linked ribonucleotides
gaaacacugaagaguuaucg

SEQ ID NO: 2016 - RNA, 20 nt, Artificial Sequence
  synthetic polynucleotide
  misc_feature (1)..(20): combination of 2'-fluoro, 2'-O-methyl, inverted abasic, phosphorothioate linked ribonucleotides
aacacugaagaguuaucgcc

SEQ ID NO: 2017 - RNA, 20 nt, Artificial Sequence
  synthetic polynucleotide
  misc_feature (1)..(20): combination of 2'-fluoro, 2'-O-methyl, inverted abasic, phosphorothioate linked ribonucleotides
cccguuuaacugauuaugga

SEQ ID NO: 2018 - RNA, 20 nt, Artificial Sequence
  synthetic polynucleotide
  misc_feature (1)..(20): combination of 2'-fluoro, 2'-O-methyl, inverted abasic, phosphorothioate linked ribonucleotides
aaaugacaacacuugaagca

SEQ ID NO: 2019 - RNA, 20 nt, Artificial Sequence
  synthetic polynucleotide
  misc_feature (1)..(20): combination of 2'-fluoro, 2'-O-methyl, inverted abasic, phosphorothioate linked ribonucleotides
cacuugaagcaugguguuuc

SEQ ID NO: 2020 - RNA, 20 nt, Artificial Sequence
  synthetic polynucleotide
  misc_feature (1)..(20): combination of 2'-fluoro, 2'-O-methyl, inverted abasic, phosphorothioate linked ribonucleotides
gauuauggaauaguucuuuc

SEQ ID NO: 2021 - RNA, 20 nt, Artificial Sequence
  synthetic polynucleotide
  misc_feature (1)..(20): combination of 2'-fluoro, 2'-O-methyl, inverted abasic, phosphorothioate linked ribonucleotides
auuauggaauaguucuuucu

SEQ ID NO: 2022 - RNA, 20 nt, Artificial Sequence
  synthetic polynucleotide
  misc_feature (1)..(20): combination of 2'-fluoro, 2'-O-methyl, inverted abasic, phosphorothioate linked ribonucleotides
uggugucucaaugcuucaau

SEQ ID NO: 2023 - RNA, 20 nt, Artificial Sequence
  synthetic polynucleotide
  misc_feature (1)..(20): combination of 2'-fluoro, 2'-O-methyl, inverted abasic, phosphorothioate linked ribonucleotides
gacaagacaggauucugaaa

SEQ ID NO: 2024 - RNA, 20 nt, Artificial Sequence
  synthetic polynucleotide
  misc_feature (1)..(20): combination of 2'-fluoro, 2'-O-methyl, inverted abasic, phosphorothioate linked ribonucleotides
cauaugucaguuguuuaaaa

SEQ ID NO: 2025 - RNA, 20 nt, Artificial Sequence
  synthetic polynucleotide
  misc_feature (1)..(20): combination of 2'-fluoro, 2'-O-methyl, inverted abasic, phosphorothioate linked ribonucleotides
aguuguuuaaaacccaauau

SEQ ID NO: 2026 - RNA, 20 nt, Artificial Sequence
  synthetic polynucleotide
  misc_feature (1)..(20): combination of 2'-fluoro, 2'-O-methyl, inverted abasic, phosphorothioate linked ribonucleotides
uuguuuaaaacccaauaucu

SEQ ID NO: 2027 - RNA, 20 nt, Artificial Sequence
  synthetic polynucleotide
  misc_feature (1)..(20): combination of 2'-fluoro, 2'-O-methyl, inverted abasic, phosphorothioate linked ribonucleotides
gaugaaguauauuuuuuauu

SEQ ID NO: 2028 - RNA, 20 nt, Artificial Sequence
  synthetic polynucleotide
  misc_feature (1)..(20): combination of 2'-fluoro, 2'-O-methyl, inverted abasic, phosphorothioate linked ribonucleotides
uuuuauugccauuuuguccu

SEQ ID NO: 2029 - RNA, 20 nt, Artificial Sequence
  synthetic polynucleotide
  misc_feature (1)..(20): combination of 2'-fluoro, 2'-O-methyl, inverted abasic, phosphorothioate linked ribonucleotides
auugccauuuuguccuuuga

SEQ ID NO: 2030 - RNA, 20 nt, Artificial Sequence
  synthetic polynucleotide
  misc_feature (1)..(20): combination of 2'-fluoro, 2'-O-methyl, inverted abasic, phosphorothioate linked ribonucleotides
auauugggaaguugacuaaa

SEQ ID NO: 2031 - RNA, 20 nt, Artificial Sequence
  synthetic polynucleotide
  misc_feature (1)..(20): combination of 2'-fluoro, 2'-O-methyl, inverted abasic, phosphorothioate linked ribonucleotides
ggaaguugacuaaacuugaa

SEQ ID NO: 2032 - RNA, 20 nt, Artificial Sequence
  synthetic polynucleotide
  misc_feature (1)..(20): combination of 2'-fluoro, 2'-O-methyl, inverted abasic, phosphorothioate linked ribonucleotides
acugugaauaaauggaagcu

SEQ ID NO: 2033 - RNA, 20 nt, Artificial Sequence
  synthetic polynucleotide
  misc_feature (1)..(20): combination of 2'-fluoro, 2'-O-methyl, inverted abasic, phosphorothioate linked ribonucleotides
cagauugcuuacucagacac

SEQ ID NO: 2034 - RNA, 20 nt, Artificial Sequence
  synthetic polynucleotide
  misc_feature (1)..(20): combination of 2'-fluoro, 2'-O-methyl, inverted abasic, phosphorothioate linked ribonucleotides
cugaagaguuaucgccagug

SEQ ID NO: 2035 - RNA, 20 nt, Artificial Sequence
  synthetic polynucleotide
  misc_feature (1)..(20): combination of 2'-fluoro, 2'-O-methyl, inverted abasic, phosphorothioate linked ribonucleotides
acccuucagaacgaaaguua

SEQ ID NO: 2036 - RNA, 20 nt, Artificial Sequence
  synthetic polynucleotide
  misc_feature (1)..(20): combination of 2'-fluoro, 2'-O-methyl, inverted abasic, phosphorothioate linked ribonucleotides
gugacccuucagaacgaaag

SEQ ID NO: 2037 - RNA, 20 nt, Artificial Sequence
  synthetic polynucleotide
  misc_feature (1)..(20): combination of 2'-fluoro, 2'-O-methyl, inverted abasic, phosphorothioate linked ribonucleotides
ucagaacgaaaguuauaugg

SEQ ID NO: 2038 - RNA, 20 nt, Artificial Sequence
  synthetic polynucleotide
  misc_feature (1)..(20): combination of 2'-fluoro, 2'-O-methyl, inverted abasic, phosphorothioate linked ribonucleotides
uucuuauuggugacguggaa

SEQ ID NO: 2039 - RNA, 20 nt, Artificial Sequence
  synthetic polynucleotide
  misc_feature (1)..(20): combination of 2'-fluoro, 2'-O-methyl, inverted abasic, phosphorothioate linked ribonucleotides
aguuauauggaaaaucacca

SEQ ID NO: 2040 - RNA, 20 nt, Artificial Sequence
  synthetic polynucleotide
  misc_feature (1)..(20): combination of 2'-fluoro, 2'-O-methyl, inverted abasic, phosphorothioate linked ribonucleotides
cccuucagaacgaaaguuau

SEQ ID NO: 2041 - RNA, 20 nt, Artificial Sequence
  synthetic polynucleotide
  misc_feature (1)..(20): combination of 2'-fluoro, 2'-O-methyl, inverted abasic, phosphorothioate linked ribonucleotides
ccuucagaacgaaaguuaua

SEQ ID NO: 2042 - RNA, 20 nt, Artificial Sequence
  synthetic polynucleotide
  misc_feature (1)..(20): combination of 2'-fluoro, 2'-O-methyl, inverted abasic, phosphorothioate linked ribonucleotides
cuucagaacgaaaguuauau

SEQ ID NO: 2043 - RNA, 20 nt, Artificial Sequence
  synthetic polynucleotide
  misc_feature (1)..(20): combination of 2'-fluoro, 2'-O-methyl, inverted abasic, phosphorothioate linked ribonucleotides
caacuucaggcccaauauug

SEQ ID NO: 2044 - RNA, 20 nt, Artificial Sequence
  synthetic polynucleotide
  misc_feature (1)..(20): combination of 2'-fluoro, 2'-O-methyl, inverted abasic, phosphorothioate linked ribonucleotides
ggaaacacugaagaguuauc

SEQ ID NO: 2045 - RNA, 20 nt, Artificial Sequence
  synthetic polynucleotide
  misc_feature (1)..(20): combination of 2'-fluoro, 2'-O-methyl, inverted abasic, phosphorothioate linked ribonucleotides
acuucaggcccaauauugua

SEQ ID NO: 2046 - RNA, 20 nt, Artificial Sequence
  synthetic polynucleotide
  misc_feature (1)..(20): combination of 2'-fluoro, 2'-O-methyl, inverted abasic, phosphorothioate linked ribonucleotides
aaguuaaagcaaccaacuuc

SEQ ID NO: 2047 - RNA, 20 nt, Artificial Sequence
  synthetic polynucleotide
  misc_feature (1)..(20): combination of 2'-fluoro, 2'-O-methyl, inverted abasic, phosphorothioate linked ribonucleotides
cuucaggcccaauauuguaa

SEQ ID NO: 2048 - RNA, 20 nt, Artificial Sequence
  synthetic polynucleotide
  misc_feature (1)..(20): combination of 2'-fluoro, 2'-O-methyl, inverted abasic, phosphorothioate linked ribonucleotides
gaccagauugcuuacucaga

SEQ ID NO: 2049 - RNA, 20 nt, Artificial Sequence
  synthetic polynucleotide
  misc_feature (1)..(20): combination of 2'-fluoro, 2'-O-methyl, inverted abasic, phosphorothioate linked ribonucleotides
acugauuauggaauaguucu

SEQ ID NO: 2050 - RNA, 20 nt, Artificial Sequence
  synthetic polynucleotide
  misc_feature (1)..(20): combination of 2'-fluoro, 2'-O-methyl, inverted abasic, phosphorothioate linked ribonucleotides
auauggaaaaucaccacucu

SEQ ID NO: 2051 - RNA, 20 nt, Artificial Sequence
  synthetic polynucleotide
  misc_feature (1)..(20): combination of 2'-fluoro, 2'-O-methyl, inverted abasic, phosphorothioate linked ribonucleotides
caaugcuucaaugucccagu

SEQ ID NO: 2052 - RNA, 20 nt, Artificial Sequence
  synthetic polynucleotide
  misc_feature (1)..(20): combination of 2'-fluoro, 2'-O-methyl, inverted abasic, phosphorothioate linked ribonucleotides
ugcuucaaugucccagugca

SEQ ID NO: 2053 - RNA, 20 nt, Artificial Sequence
  synthetic polynucleotide
  misc_feature (1)..(20): combination of 2'-fluoro, 2'-O-methyl, inverted abasic, phosphorothioate linked ribonucleotides
aaugacaagacaggauucug

SEQ ID NO: 2054 - RNA, 20 nt, Artificial Sequence
  synthetic polynucleotide
  misc_feature (1)..(20): combination of 2'-fluoro, 2'-O-methyl, inverted abasic, phosphorothioate linked ribonucleotides
cuaagaucugaugaaguaua

SEQ ID NO: 2055 - RNA, 20 nt, Artificial Sequence
  synthetic polynucleotide
  misc_feature (1)..(20): combination of 2'-fluoro, 2'-O-methyl, inverted abasic, phosphorothioate linked ribonucleotides
cuggugucucaaugcuucaa

SEQ ID NO: 2056 - RNA, 20 nt, Artificial Sequence
  synthetic polynucleotide
  misc_feature (1)..(20): combination of 2'-fluoro, 2'-O-methyl, inverted abasic, phosphorothioate linked ribonucleotides
ugucucaaugcuucaauguc

SEQ ID NO: 2057 - RNA, 20 nt, Artificial Sequence
  synthetic polynucleotide
  misc_feature (1)..(20): combination of 2'-fluoro, 2'-O-methyl, inverted abasic, phosphorothioate linked ribonucleotides
uuuuccauagaucuggaucu

SEQ ID NO: 2058 - RNA, 20 nt, Artificial Sequence
  synthetic polynucleotide
  misc_feature (1)..(20): combination of 2'-fluoro, 2'-O-methyl, inverted abasic, phosphorothioate linked ribonucleotides
ugugacccuucagaacgaaa

SEQ ID NO: 2059 - RNA, 20 nt, Artificial Sequence
  synthetic polynucleotide
  misc_feature (1)..(20): combination of 2'-fluoro, 2'-O-methyl, inverted abasic, phosphorothioate linked ribonucleotides
cagugugacccuucagaacg

SEQ ID NO: 2060 - RNA, 20 nt, Artificial Sequence
  synthetic polynucleotide
  misc_feature (1)..(20): combination of 2'-fluoro, 2'-O-methyl, inverted abasic, phosphorothioate linked ribonucleotides
caccccaaauauggcuggaa

SEQ ID NO: 2061 - RNA, 20 nt, Artificial Sequence
  synthetic polynucleotide
  misc_feature (1)..(20): combination of 2'-fluoro, 2'-O-methyl, inverted abasic, phosphorothioate linked ribonucleotides
cucaaugcuucaauguccca

SEQ ID NO: 2062 - RNA, 20 nt, Artificial Sequence
  synthetic polynucleotide
  misc_feature (1)..(20): combination of 2'-fluoro, 2'-O-methyl, inverted abasic, phosphorothioate linked ribonucleotides
acaggauucugaaaacuccc

SEQ ID NO: 2063 - RNA, 20 nt, Artificial Sequence
  synthetic polynucleotide
  misc_feature (1)..(20): combination of 2'-fluoro, 2'-O-methyl, inverted abasic, phosphorothioate linked ribonucleotides
ggauccuugccauuccccuc

SEQ ID NO: 2064 - RNA, 20 nt, Artificial Sequence
  synthetic polynucleotide
  misc_feature (1)..(20): combination of 2'-fluoro, 2'-O-methyl, inverted abasic, phosphorothioate linked ribonucleotides
cugcagauauuaauuuucca

SEQ ID NO: 2065 - RNA, 20 nt, Artificial Sequence
  synthetic polynucleotide
  misc_feature (1)..(20): combination of 2'-fluoro, 2'-O-methyl, inverted abasic, phosphorothioate linked ribonucleotides
aagaucugaugaaguauauu

SEQ ID NO: 2066 - RNA, 20 nt, Artificial Sequence
  synthetic polynucleotide
  misc_feature (1)..(20): combination of 2'-fluoro, 2'-O-methyl, inverted abasic, phosphorothioate linked ribonucleotides
aauagcagacuuguuccgac

SEQ ID NO: 2067 - RNA, 20 nt, Artificial Sequence
  synthetic polynucleotide
  misc_feature (1)..(20): combination of 2'-fluoro, 2'-O-methyl, inverted abasic, phosphorothioate linked ribonucleotides
gacaacacuugaagcauggu

SEQ ID NO: 2068 - RNA, 20 nt, Artificial Sequence
  synthetic polynucleotide
  misc_feature (1)..(20): combination of 2'-fluoro, 2'-O-methyl, inverted abasic, phosphorothioate linked ribonucleotides
ucagacagcauuggauuucc

SEQ ID NO: 2069 - RNA, 20 nt, Artificial Sequence
  synthetic polynucleotide
  misc_feature (1)..(20): combination of 2'-fluoro, 2'-O-methyl, inverted abasic, phosphorothioate linked ribonucleotides
uggaaaaucaccacucuuug

SEQ ID NO: 2070 - RNA, 20 nt, Artificial Sequence
  synthetic polynucleotide
  misc_feature (1)..(20): combination of 2'-fluoro, 2'-O-methyl, inverted abasic, phosphorothioate linked ribonucleotides
agacagcauuggauuuccua

SEQ ID NO: 2071 - RNA, 20 nt, Artificial Sequence
  synthetic polynucleotide
  misc_feature (1)..(20): combination of 2'-fluoro, 2'-O-methyl, inverted abasic, phosphorothioate linked ribonucleotides
cugauuauggaauaguucuu

SEQ ID NO: 2072 - RNA, 21 nt, Artificial Sequence
  synthetic polynucleotide
  misc_feature (1)..(21): combination of 2'-fluoro, 2'-O-methyl, phosphorothioate linked ribonucleotides
uuccauauagugcuugcucgu

SEQ ID NO: 2073 - RNA, 21 nt, Artificial Sequence
  synthetic polynucleotide
  misc_feature (1)..(21): combination of 2'-fluoro, 2'-O-methyl, phosphorothioate linked ribonucleotides
ucauuugccgagaacuucugu

SEQ ID NO: 2074 - RNA, 21 nt, Artificial Sequence
  synthetic polynucleotide
  misc_feature (1)..(21): combination of 2'-fluoro, 2'-O-methyl, phosphorothioate linked ribonucleotides
uuccaaauucagcuugcucgu

SEQ ID NO: 2075 - RNA, 21 nt, Artificial Sequence
  synthetic polynucleotide
  misc_feature (1)..(21): combination of 2'-fluoro, 2'-O-methyl, phosphorothioate linked ribonucleotides
ucauuagcgcugaacuucugu

SEQ ID NO: 2076 - RNA, 23 nt, Artificial Sequence
  synthetic polynucleotide
  misc_feature (1)..(23): combination of 2'-fluoro, 2'-O-methyl, phosphorothioate linked ribonucleotides
aaucagagcagugcguccuucuu

SEQ ID NO: 2077 - RNA, 23 nt, Artificial Sequence
  synthetic polynucleotide
  misc_feature (1)..(23): combination of 2'-fluoro, 2'-O-methyl, phosphorothioate linked ribonucleotides
acaaucagagcagugcguccuuu

SEQ ID NO: 2078 - RNA, 23 nt, Artificial Sequence
  synthetic polynucleotide
  misc_feature (1)..(23): combination of 2'-fluoro, 2'-O-methyl, phosphorothioate linked ribonucleotides
accaaucagagcagugcguccuu

SEQ ID NO: 2079 - RNA, 23 nt, Artificial Sequence
  synthetic polynucleotide
  misc_feature (1)..(23): combination of 2'-fluoro, 2'-O-methyl, phosphorothioate linked ribonucleotides
aggccaaucagagcagugcguuu

SEQ ID NO: 2080 - RNA, 23 nt, Artificial Sequence
  synthetic polynucleotide
  misc_feature (1)..(23): combination of 2'-fluoro, 2'-O-methyl, phosphorothioate linked ribonucleotides
auuccgggccaaucagagcaguu

SEQ ID NO: 2081 - RNA, 23 nt, Artificial Sequence
  synthetic polynucleotide
  misc_feature (1)..(23): combination of 2'-fluoro, 2'-O-methyl, phosphorothioate linked ribonucleotides
acuuccgggccaaucagagcauu

SEQ ID NO: 2082 - RNA, 23 nt, Artificial Sequence
  synthetic polynucleotide
  misc_feature (1)..(23): combination of 2'-fluoro, 2'-O-methyl, phosphorothioate linked ribonucleotides
accuuccgggccaaucagagcuu

SEQ ID NO: 2083 - RNA, 23 nt, Artificial Sequence
  synthetic polynucleotide
  misc_feature (1)..(23): combination of 2'-fluoro, 2'-O-methyl, phosphorothioate linked ribonucleotides
aaggugcggccuuuggccccguu

SEQ ID NO: 2084 - RNA, 23 nt, Artificial Sequence
  synthetic polynucleotide
  misc_feature (1)..(23): combination of 2'-fluoro, 2'-O-methyl, phosphorothioate linked ribonucleotides
aaaggugcggccuuuggccccuu

SEQ ID NO: 2085 - RNA, 23 nt, Artificial Sequence
  synthetic polynucleotide
  misc_feature (1)..(23): combination of 2'-fluoro, 2'-O-methyl, phosphorothioate linked ribonucleotides
agggaaggugcggccuuuggcuu

SEQ ID NO: 2086 - RNA, 23 nt, Artificial Sequence
  synthetic polynucleotide
  misc_feature (1)..(23): combination of 2'-fluoro, 2'-O-methyl, phosphorothioate linked ribonucleotides
aggggaaggugcggccuuugguu

SEQ ID NO: 2087 - RNA, 23 nt, Artificial Sequence
  synthetic polynucleotide
  misc_feature (1)..(23): combination of 2'-fluoro, 2'-O-methyl, phosphorothioate linked ribonucleotides
uggcuucuccgcgagguggcguu

SEQ ID NO: 2088 - RNA, 23 nt, Artificial Sequence
  synthetic polynucleotide
  misc_feature (1)..(23): combination of 2'-fluoro, 2'-O-methyl, phosphorothioate linked ribonucleotides
auggcuucuccgcgagguggcuu

SEQ ID NO: 2089 - RNA, 23 nt, Artificial Sequence
  synthetic polynucleotide
  misc_feature (1)..(23): combination of 2'-fluoro, 2'-O-methyl, phosphorothioate linked ribonucleotides
acuggcuucuccgcgaggugguu

SEQ ID NO: 2090 - RNA, 23 nt, Artificial Sequence
  synthetic polynucleotide
  misc_feature (1)..(23): combination of 2'-fluoro, 2'-O-methyl, phosphorothioate linked ribonucleotides
uggcuggcuucuccgcgagguuu

SEQ ID NO: 2091 - RNA, 23 nt, Artificial Sequence
  synthetic polynucleotide
  misc_feature (1)..(23): combination of 2'-fluoro, 2'-O-methyl, phosphorothioate linked ribonucleotides
uguuucccuccugguugaucauu

SEQ ID NO: 2092 - RNA, 23 nt, Artificial Sequence
  synthetic polynucleotide
  misc_feature (1)..(23): combination of 2'-fluoro, 2'-O-methyl, phosphorothioate linked ribonucleotides
aauguuucccuccugguugauuu

SEQ ID NO: 2093 - RNA, 23 nt, Artificial Sequence
  synthetic polynucleotide
  misc_feature (1)..(23): combination of 2'-fluoro, 2'-O-methyl, phosphorothioate linked ribonucleotides
acauguuucccuccugguugauu

SEQ ID NO: 2094 - RNA, 23 nt, Artificial Sequence
  synthetic polynucleotide
  misc_feature (1)..(23): combination of 2'-fluoro, 2'-O-methyl, phosphorothioate linked ribonucleotides
accauguuucccuccugguuguu

SEQ ID NO: 2095 - RNA, 23 nt, Artificial Sequence
  synthetic polynucleotide
  misc_feature (1)..(23): combination of 2'-fluoro, 2'-O-methyl, phosphorothioate linked ribonucleotides
aaccauguuucccuccugguuuu

SEQ ID NO: 2096 - RNA, 23 nt, Artificial Sequence
  synthetic polynucleotide
  misc_feature (1)..(23): combination of 2'-fluoro, 2'-O-methyl, phosphorothioate linked ribonucleotides
uaaccauguuucccuccugguuu

SEQ ID NO: 2097 - RNA, 23 nt, Artificial Sequence
  synthetic polynucleotide
  misc_feature (1)..(23): combination of 2'-fluoro, 2'-O-methyl, phosphorothioate linked ribonucleotides
aggcgagguuccuggcgagcauu

SEQ ID NO: 2098 - RNA, 23 nt, Artificial Sequence
  synthetic polynucleotide
  misc_feature (1)..(23): combination of 2'-fluoro, 2'-O-methyl, phosphorothioate linked ribonucleotides
acaggcgagguuccuggcgaguu

SEQ ID NO: 2099 - RNA, 23 nt, Artificial Sequence
  synthetic polynucleotide
  misc_feature (1)..(23): combination of 2'-fluoro, 2'-O-methyl, phosphorothioate linked ribonucleotides
aucaggaccaggcgagguuccuu

SEQ ID NO: 2100 - RNA, 23 nt, Artificial Sequence
  synthetic polynucleotide
  misc_feature (1)..(23): combination of 2'-fluoro, 2'-O-methyl, phosphorothioate linked ribonucleotides
aaaucaggaccaggcgagguuuu

SEQ ID NO: 2101 - RNA, 23 nt, Artificial Sequence
  synthetic polynucleotide
  misc_feature (1)..(23): combination of 2'-fluoro, 2'-O-methyl, phosphorothioate linked ribonucleotides
aaaaucaggaccaggcgagguuu

SEQ ID NO: 2102 - RNA, 23 nt, Artificial Sequence
  synthetic polynucleotide
  misc_feature (1)..(23): combination of 2'-fluoro, 2'-O-methyl, phosphorothioate linked ribonucleotides
agaaaucaggaccaggcgagguu

SEQ ID NO: 2103 - RNA, 23 nt, Artificial Sequence
  synthetic polynucleotide
  misc_feature (1)..(23): combination of 2'-fluoro, 2'-O-methyl, phosphorothioate linked ribonucleotides
aggaaaucaggaccaggcgaguu

SEQ ID NO: 2104 - RNA, 23 nt, Artificial Sequence
  synthetic polynucleotide
  misc_feature (1)..(23): combination of 2'-fluoro, 2'-O-methyl, phosphorothioate linked ribonucleotides
aucagggaaaucaggaccagguu

SEQ ID NO: 2105 - RNA, 23 nt, Artificial Sequence
  synthetic polynucleotide
  misc_feature (1)..(23): combination of 2'-fluoro, 2'-O-methyl, phosphorothioate linked ribonucleotides
auguaggcugcacugagagucuu

SEQ ID NO: 2106 - RNA, 23 nt, Artificial Sequence
  synthetic polynucleotide
  misc_feature (1)..(23): combination of 2'-fluoro, 2'-O-methyl, phosphorothioate linked ribonucleotides
uuguguaggcugcacugagaguu

SEQ ID NO: 2107 - RNA, 23 nt, Artificial Sequence
  synthetic polynucleotide
  misc_feature (1)..(23): combination of 2'-fluoro, 2'-O-methyl, phosphorothioate linked ribonucleotides
uuuguguaggcugcacugagauu

SEQ ID NO: 2108 - RNA, 23 nt, Artificial Sequence
  synthetic polynucleotide
  misc_feature (1)..(23): combination of 2'-fluoro, 2'-O-methyl, phosphorothioate linked ribonucleotides
auuuguguaggcugcacugaguu

SEQ ID NO: 2109 - RNA, 23 nt, Artificial Sequence
  synthetic polynucleotide
  misc_feature (1)..(23): combination of 2'-fluoro, 2'-O-methyl, phosphorothioate linked ribonucleotides
acuuuguguaggcugcacugauu

SEQ ID NO: 2110 - RNA, 23 nt, Artificial Sequence
  synthetic polynucleotide
  misc_feature (1)..(23): combination of 2'-fluoro, 2'-O-methyl, phosphorothioate linked ribonucleotides
uuguggugggcguuuugauaguu

SEQ ID NO: 2111 - RNA, 23 nt, Artificial Sequence
  synthetic polynucleotide
  misc_feature (1)..(23): combination of 2'-fluoro, 2'-O-methyl, phosphorothioate linked ribonucleotides
uuuguggugggcguuuugauauu

SEQ ID NO: 2112 - RNA, 23 nt, Artificial Sequence
  synthetic polynucleotide
  misc_feature (1)..(23): combination of 2'-fluoro, 2'-O-methyl, phosphorothioate linked ribonucleotides
auuuguggugggcguuuugauuu

SEQ ID NO: 2113 - RNA, 23 nt, Artificial Sequence
  synthetic polynucleotide
  misc_feature (1)..(23): combination of 2'-fluoro, 2'-O-methyl, phosphorothioate linked ribonucleotides
aauuuguggugggcguuuugauu

SEQ ID NO: 2114 - RNA, 23 nt, Artificial Sequence
  synthetic polynucleotide
  misc_feature (1)..(23): combination of 2'-fluoro, 2'-O-methyl, phosphorothioate linked ribonucleotides
augcauuuguggugggcguuuuu

SEQ ID NO: 2115 - RNA, 23 nt, Artificial Sequence
  synthetic polynucleotide
  misc_feature (1)..(23): combination of 2'-fluoro, 2'-O-methyl, phosphorothioate linked ribonucleotides
acugcauuuguggugggcguuuu

SEQ ID NO: 2116 - RNA, 23 nt, Artificial Sequence
  synthetic polynucleotide
  misc_feature (1)..(23): combination of 2'-fluoro, 2'-O-methyl, phosphorothioate linked ribonucleotides
aggaagcugguuauccacugguu

SEQ ID NO: 2117 - RNA, 23 nt, Artificial Sequence
  synthetic polynucleotide
  misc_feature (1)..(23): combination of 2'-fluoro, 2'-O-methyl, phosphorothioate linked ribonucleotides
aaggaagcugguuauccacuguu

SEQ ID NO: 2118 - RNA, 23 nt, Artificial Sequence
  synthetic polynucleotide
  misc_feature (1)..(23): combination of 2'-fluoro, 2'-O-methyl, phosphorothioate linked ribonucleotides
uucaggaagcugguuauccacuu

SEQ ID NO: 2119 - RNA, 23 nt, Artificial Sequence
  synthetic polynucleotide
  misc_feature (1)..(23): combination of 2'-fluoro, 2'-O-methyl, phosphorothioate linked ribonucleotides
aacuucaggaagcugguuaucuu

SEQ ID NO: 2120 - RNA, 23 nt, Artificial Sequence
  synthetic polynucleotide
  misc_feature (1)..(23): combination of 2'-fluoro, 2'-O-methyl, phosphorothioate linked ribonucleotides
agaacaagucugcuauuugauuu

SEQ ID NO: 2121 - RNA, 23 nt, Artificial Sequence
  synthetic polynucleotide
  misc_feature (1)..(23): combination of 2'-fluoro, 2'-O-methyl, phosphorothioate linked ribonucleotides
ucggaacaagucugcuauuuguu

SEQ ID NO: 2122 - RNA, 23 nt, Artificial Sequence
  synthetic polynucleotide
  misc_feature (1)..(23): combination of 2'-fluoro, 2'-O-methyl, phosphorothioate linked ribonucleotides
aucggaacaagucugcuauuuuu

SEQ ID NO: 2123 - RNA, 23 nt, Artificial Sequence
  synthetic polynucleotide
  misc_feature (1)..(23): combination of 2'-fluoro, 2'-O-methyl, phosphorothioate linked ribonucleotides
acgucaccaauaagaagcucauu

SEQ ID NO: 2124 - RNA, 23 nt, Artificial Sequence
  synthetic polynucleotide
  misc_feature (1)..(23): combination of 2'-fluoro, 2'-O-methyl, phosphorothioate linked ribonucleotides
acacgucaccaauaagaagcuuu

SEQ ID NO: 2125 - RNA, 23 nt, Artificial Sequence
  synthetic polynucleotide
  misc_feature (1)..(23): combination of 2'-fluoro, 2'-O-methyl, phosphorothioate linked ribonucleotides
uccacgucaccaauaagaagcuu

SEQ ID NO: 2126 - RNA, 23 nt, Artificial Sequence
  synthetic polynucleotide
  misc_feature (1)..(23): combination of 2'-fluoro, 2'-O-methyl, phosphorothioate linked ribonucleotides
auuccacgucaccaauaagaauu

SEQ ID NO: 2127 - RNA, 23 nt, Artificial Sequence
  synthetic polynucleotide
  misc_feature (1)..(23): combination of 2'-fluoro, 2'-O-methyl, phosphorothioate linked ribonucleotides
uuuucaguuccacgucaccaauu

SEQ ID NO: 2128 - RNA, 23 nt, Artificial Sequence
  synthetic polynucleotide
  misc_feature (1)..(23): combination of 2'-fluoro, 2'-O-methyl, phosphorothioate linked ribonucleotides
auuuucaguuccacgucaccauu

SEQ ID NO: 2129 - RNA, 23 nt, Artificial Sequence
  synthetic polynucleotide
  misc_feature (1)..(23): combination of 2'-fluoro, 2'-O-methyl, phosphorothioate linked ribonucleotides
acuuuucaguuccacgucaccuu

SEQ ID NO: 2130 - RNA, 23 nt, Artificial Sequence
  synthetic polynucleotide
  misc_feature (1)..(23): combination of 2'-fluoro, 2'-O-methyl, phosphorothioate linked ribonucleotides
accuuuucaguuccacgucacuu

SEQ ID NO: 2131 - RNA, 23 nt, Artificial Sequence
  synthetic polynucleotide
  misc_feature (1)..(23): combination of 2'-fluoro, 2'-O-methyl, phosphorothioate linked ribonucleotides
uaaaaugcaucuggaacaagcuu

SEQ ID NO: 2132 - RNA, 23 nt, Artificial Sequence
  synthetic polynucleotide
  misc_feature (1)..(23): combination of 2'-fluoro, 2'-O-methyl, phosphorothioate linked ribonucleotides
ugguuaaaaugcaucuggaacuu

SEQ ID NO: 2133 - RNA, 23 nt, Artificial Sequence
  synthetic polynucleotide
  misc_feature (1)..(23): combination of 2'-fluoro, 2'-O-methyl, phosphorothioate linked ribonucleotides
augguuaaaaugcaucuggaauu

SEQ ID NO: 2134 - RNA, 23 nt, Artificial Sequence
  synthetic polynucleotide
  misc_feature (1)..(23): combination of 2'-fluoro, 2'-O-methyl, phosphorothioate linked ribonucleotides
auccacugugguuaaaaugcauu

SEQ ID NO: 2135 - RNA, 23 nt, Artificial Sequence
  synthetic polynucleotide
  misc_feature (1)..(23): combination of 2'-fluoro, 2'-O-methyl, phosphorothioate linked ribonucleotides
aguccacugugguuaaaaugcuu

SEQ ID NO: 2136 - RNA, 23 nt, Artificial Sequence
  synthetic polynucleotide
  misc_feature (1)..(23): combination of 2'-fluoro, 2'-O-methyl, phosphorothioate linked ribonucleotides
uuccuuccugcucaugacaccuu

SEQ ID NO: 2137 - RNA, 23 nt, Artificial Sequence
  synthetic polynucleotide
  misc_feature (1)..(23): combination of 2'-fluoro, 2'-O-methyl, phosphorothioate linked ribonucleotides
auucaguguuuccagcgguucuu

SEQ ID NO: 2138 - RNA, 23 nt, Artificial Sequence
  synthetic polynucleotide
  misc_feature (1)..(23): combination of 2'-fluoro, 2'-O-methyl, phosphorothioate linked ribonucleotides
uaacucuucaguguuuccagcuu

SEQ ID NO: 2139 - RNA, 23 nt, Artificial Sequence
  synthetic polynucleotide
  misc_feature (1)..(23): combination of 2'-fluoro, 2'-O-methyl, phosphorothioate linked ribonucleotides
agauaacucuucaguguuuccuu

SEQ ID NO: 2140 - RNA, 23 nt, Artificial Sequence
  synthetic polynucleotide
  misc_feature (1)..(23): combination of 2'-fluoro, 2'-O-methyl, phosphorothioate linked ribonucleotides
acgauaacucuucaguguuucuu

SEQ ID NO: 2141 - RNA, 23 nt, Artificial Sequence
  synthetic polynucleotide
  misc_feature (1)..(23): combination of 2'-fluoro, 2'-O-methyl, phosphorothioate linked ribonucleotides
agcgauaacucuucaguguuuuu

SEQ ID NO: 2142 - RNA, 23 nt, Artificial Sequence
  synthetic polynucleotide
  misc_feature (1)..(23): combination of 2'-fluoro, 2'-O-methyl, phosphorothioate linked ribonucleotides
uggcgauaacucuucaguguuuu

SEQ ID NO: 2143 - RNA, 23 nt, Artificial Sequence
  synthetic polynucleotide
  misc_feature (1)..(23): combination of 2'-fluoro, 2'-O-methyl, phosphorothioate linked ribonucleotides
auggcgauaacucuucaguguuu

SEQ ID NO: 2144 - RNA, 23 nt, Artificial Sequence
  synthetic polynucleotide
  misc_feature (1)..(23): combination of 2'-fluoro, 2'-O-methyl, phosphorothioate linked ribonucleotides
acuggcgauaacucuucaguguu

SEQ ID NO: 2145 - RNA, 23 nt, Artificial Sequence
  synthetic polynucleotide
  misc_feature (1)..(23): combination of 2'-fluoro, 2'-O-methyl, phosphorothioate linked ribonucleotides
aacuggcgauaacucuucaguuu

SEQ ID NO: 2146 - RNA, 23 nt, Artificial Sequence
  synthetic polynucleotide
  misc_feature (1)..(23): combination of 2'-fluoro, 2'-O-methyl, phosphorothioate linked ribonucleotides
acacuggcgauaacucuucaguu

SEQ ID NO: 2147 - RNA, 23 nt, Artificial Sequence
  synthetic polynucleotide
  misc_feature (1)..(23): combination of 2'-fluoro, 2'-O-methyl, phosphorothioate linked ribonucleotides
aacacuggcgauaacucuucauu

SEQ ID NO: 2148 - RNA, 23 nt, Artificial Sequence
  synthetic polynucleotide
  misc_feature (1)..(23): combination of 2'-fluoro, 2'-O-methyl, phosphorothioate linked ribonucleotides
ucacacuggcgauaacucuucuu

SEQ ID NO: 2149 - RNA, 23 nt, Artificial Sequence
  synthetic polynucleotide
  misc_feature (1)..(23): combination of 2'-fluoro, 2'-O-methyl, phosphorothioate linked ribonucleotides
aggucacacuggcgauaacucuu

SEQ ID NO: 2150 - RNA, 23 nt, Artificial Sequence
  synthetic polynucleotide
  misc_feature (1)..(23): combination of 2'-fluoro, 2'-O-methyl, phosphorothioate linked ribonucleotides
agggucacacuggcgauaacuuu

SEQ ID NO: 2151 - RNA, 23 nt, Artificial Sequence
  synthetic polynucleotide
  misc_feature (1)..(23): combination of 2'-fluoro, 2'-O-methyl, phosphorothioate linked ribonucleotides
aagggucacacuggcgauaacuu

SEQ ID NO: 2152 - RNA, 23 nt, Artificial Sequence
  synthetic polynucleotide
  misc_feature (1)..(23): combination of 2'-fluoro, 2'-O-methyl, phosphorothioate linked ribonucleotides
aaagggucacacuggcgauaauu

SEQ ID NO: 2153 - RNA, 23 nt, Artificial Sequence
  synthetic polynucleotide
  misc_feature (1)..(23): combination of 2'-fluoro, 2'-O-methyl, phosphorothioate linked ribonucleotides
uucugaagggucacacuggcguu

SEQ ID NO: 2154 - RNA, 23 nt, Artificial Sequence
  synthetic polynucleotide
  misc_feature (1)..(23): combination of 2'-fluoro, 2'-O-methyl, phosphorothioate linked ribonucleotides
auucugaagggucacacuggcuu

SEQ ID NO: 2155 - RNA, 23 nt, Artificial Sequence
  synthetic polynucleotide
  misc_feature (1)..(23): combination of 2'-fluoro, 2'-O-methyl, phosphorothioate linked ribonucleotides
ucguucugaagggucacacuguu

SEQ ID NO: 2156 - RNA, 23 nt, Artificial Sequence
  synthetic polynucleotide
  misc_feature (1)..(23): combination of 2'-fluoro, 2'-O-methyl, phosphorothioate linked ribonucleotides
uucguucugaagggucacacuuu

SEQ ID NO: 2157 - RNA, 23 nt, Artificial Sequence
  synthetic polynucleotide
  misc_feature (1)..(23): combination of 2'-fluoro, 2'-O-methyl, phosphorothioate linked ribonucleotides
uuucguucugaagggucacacuu

SEQ ID NO: 2158 - RNA, 23 nt, Artificial Sequence
  synthetic polynucleotide
  misc_feature (1)..(23): combination of 2'-fluoro, 2'-O-methyl, phosphorothioate linked ribonucleotides
auuucguucugaagggucacauu

SEQ ID NO: 2159 - RNA, 23 nt, Artificial Sequence
  synthetic polynucleotide
  misc_feature (1)..(23): combination of 2'-fluoro, 2'-O-methyl, phosphorothioate linked ribonucleotides
acuuucguucugaagggucacuu

SEQ ID NO: 2160 - RNA, 23 nt, Artificial Sequence
  synthetic polynucleotide
  misc_feature (1)..(23): combination of 2'-fluoro, 2'-O-methyl, phosphorothioate linked ribonucleotides
aacuuucguucugaagggucauu

SEQ ID NO: 2161 - RNA, 23 nt, Artificial Sequence
  synthetic polynucleotide
  misc_feature (1)..(23): combination of 2'-fluoro, 2'-O-methyl, phosphorothioate linked ribonucleotides
uaacuuucguucugaagggucuu

SEQ ID NO: 2162 - RNA, 23 nt, Artificial Sequence
  synthetic polynucleotide
  misc_feature (1)..(23): combination of 2'-fluoro, 2'-O-methyl, phosphorothioate linked ribonucleotides
auaacuuucguucugaaggguuu

SEQ ID NO: 2163 - RNA, 23 nt, Artificial Sequence
  synthetic polynucleotide
  misc_feature (1)..(23): combination of 2'-fluoro, 2'-O-methyl, phosphorothioate linked ribonucleotides
uauaacuuucguucugaaggguu

SEQ ID NO: 2164 - RNA, 23 nt, Artificial Sequence
  synthetic polynucleotide
  misc_feature (1)..(23): combination of 2'-fluoro, 2'-O-methyl, phosphorothioate linked ribonucleotides
auauaacuuucguucugaagguu

SEQ ID NO: 2165 - RNA, 23 nt, Artificial Sequence
  synthetic polynucleotide
  misc_feature (1)..(23): combination of 2'-fluoro, 2'-O-methyl, phosphorothioate linked ribonucleotides
aauauaacuuucguucugaaguu

SEQ ID NO: 2166 - RNA, 23 nt, Artificial Sequence
  synthetic polynucleotide
  misc_feature (1)..(23): combination of 2'-fluoro, 2'-O-methyl, phosphorothioate linked ribonucleotides
acauauaacuuucguucugaauu

SEQ ID NO: 2167 - RNA, 23 nt, Artificial Sequence
  synthetic polynucleotide
  misc_feature (1)..(23): combination of 2'-fluoro, 2'-O-methyl, phosphorothioate linked ribonucleotides
uccauauaacuuucguucugauu

SEQ ID NO: 2168 - RNA, 23 nt, Artificial Sequence
  synthetic polynucleotide
  misc_feature (1)..(23): combination of 2'-fluoro, 2'-O-methyl, phosphorothioate linked ribonucleotides
uuccauauaacuuucguucuguu

SEQ ID NO: 2169 - RNA, 23 nt, Artificial Sequence
  synthetic polynucleotide
  misc_feature (1)..(23): combination of 2'-fluoro, 2'-O-methyl, phosphorothioate linked ribonucleotides
auggugauuuuccauauaacuuu

SEQ ID NO: 2170 - RNA, 23 nt, Artificial Sequence
  synthetic polynucleotide
  misc_feature (1)..(23): combination of 2'-fluoro, 2'-O-methyl, phosphorothioate linked ribonucleotides
aaguggugauuuuccauauaauu

SEQ ID NO: 2171 - RNA, 23 nt, Artificial Sequence
  synthetic polynucleotide
  misc_feature (1)..(23): combination of 2'-fluoro, 2'-O-methyl, phosphorothioate linked ribonucleotides
agucggaacaagucugcuauuuu

SEQ ID NO: 2172 - RNA, 23 nt, Artificial Sequence
  synthetic polynucleotide
  misc_feature (1)..(23): combination of 2'-fluoro, 2'-O-methyl, phosphorothioate linked ribonucleotides
aggucggaacaagucugcuauuu

SEQ ID NO: 2173 - RNA, 23 nt, Artificial Sequence
  synthetic polynucleotide
  misc_feature (1)..(23): combination of 2'-fluoro, 2'-O-methyl, phosphorothioate linked ribonucleotides
ugggucggaacaagucugcuauu

SEQ ID NO: 2174 - RNA, 23 nt, Artificial Sequence
  synthetic polynucleotide
  misc_feature (1)..(23): combination of 2'-fluoro, 2'-O-methyl, phosphorothioate linked ribonucleotides
uugggucggaacaagucugcuuu

SEQ ID NO: 2175 - RNA, 23 nt, Artificial Sequence
  synthetic polynucleotide
  misc_feature (1)..(23): combination of 2'-fluoro, 2'-O-methyl, phosphorothioate linked ribonucleotides
auugggucggaacaagucugcuu

SEQ ID NO: 2176 - RNA, 23 nt, Artificial Sequence
  synthetic polynucleotide
  misc_feature (1)..(23): combination of 2'-fluoro, 2'-O-methyl, phosphorothioate linked ribonucleotides
acuugggucggaacaagucuguu

SEQ ID NO: 2177 - RNA, 23 nt, Artificial Sequence
  synthetic polynucleotide
  misc_feature (1)..(23): combination of 2'-fluoro, 2'-O-methyl, phosphorothioate linked ribonucleotides
uccuugggucggaacaagucuuu

SEQ ID NO: 2178 - RNA, 23 nt, Artificial Sequence
  synthetic polynucleotide
  misc_feature (1)..(23): combination of 2'-fluoro, 2'-O-methyl, phosphorothioate linked ribonucleotides
auccuugggucggaacaagucuu

SEQ ID NO: 2179 - RNA, 23 nt, Artificial Sequence
  synthetic polynucleotide
  misc_feature (1)..(23): combination of 2'-fluoro, 2'-O-methyl, phosphorothioate linked ribonucleotides
aguccuugggucggaacaaguuu

SEQ ID NO: 2180 - RNA, 23 nt, Artificial Sequence
  synthetic polynucleotide
  misc_feature (1)..(23): combination of 2'-fluoro, 2'-O-methyl, phosphorothioate linked ribonucleotides
ugguccuugggucggaacaaguu

SEQ ID NO: 2181 - RNA, 23 nt, Artificial Sequence
  synthetic polynucleotide
  misc_feature (1)..(23): combination of 2'-fluoro, 2'-O-methyl, phosphorothioate linked ribonucleotides
aaucugguccuugggucggaauu

SEQ ID NO: 2182 - RNA, 23 nt, Artificial Sequence
  synthetic polynucleotide
  misc_feature (1)..(23): combination of 2'-fluoro, 2'-O-methyl, phosphorothioate linked ribonucleotides
ugaguaagcaaucugguccuuuu

SEQ ID NO: 2183 - RNA, 23 nt, Artificial Sequence
  synthetic polynucleotide
  misc_feature (1)..(23): combination of 2'-fluoro, 2'-O-methyl, phosphorothioate linked ribonucleotides
aucugaguaagcaaucuggucuu

SEQ ID NO: 2184 - RNA, 23 nt, Artificial Sequence
  synthetic polynucleotide
  misc_feature (1)..(23): combination of 2'-fluoro, 2'-O-methyl, phosphorothioate linked ribonucleotides
augucugaguaagcaaucugguu

SEQ ID NO: 2185 - RNA, 23 nt, Artificial Sequence
  synthetic polynucleotide
  misc_feature (1)..(23): combination of 2'-fluoro, 2'-O-methyl, phosphorothioate linked ribonucleotides
agugucugaguaagcaaucuguu

SEQ ID NO: 2186 - RNA, 23 nt, Artificial Sequence
  synthetic polynucleotide
  misc_feature (1)..(23): combination of 2'-fluoro, 2'-O-methyl, phosphorothioate linked ribonucleotides
uggugucugaguaagcaaucuuu

SEQ ID NO: 2187 - RNA, 23 nt, Artificial Sequence
  synthetic polynucleotide
  misc_feature (1)..(23): combination of 2'-fluoro, 2'-O-methyl, phosphorothioate linked ribonucleotides
auggugucugaguaagcaaucuu

SEQ ID NO: 2188 - RNA, 23 nt, Artificial Sequence
  synthetic polynucleotide
  misc_feature (1)..(23): combination of 2'-fluoro, 2'-O-methyl, phosphorothioate linked ribonucleotides
acuggugucugaguaagcaauuu

SEQ ID NO: 2189 - RNA, 23 nt, Artificial Sequence
  synthetic polynucleotide
  misc_feature (1)..(23): combination of 2'-fluoro, 2'-O-methyl, phosphorothioate linked ribonucleotides
ugggcuggugucugaguaagcuu

SEQ ID NO: 2190 - RNA, 23 nt, Artificial Sequence
  synthetic polynucleotide
  misc_feature (1)..(23): combination of 2'-fluoro, 2'-O-methyl, phosphorothioate linked ribonucleotides
aaugggcuggugucugaguaauu

SEQ ID NO: 2191 - RNA, 23 nt, Artificial Sequence
  synthetic polynucleotide
  misc_feature (1)..(23): combination of 2'-fluoro, 2'-O-methyl, phosphorothioate linked ribonucleotides
auagccuggaguugagauccguu

SEQ ID NO: 2192 - RNA, 23 nt, Artificial Sequence
  synthetic polynucleotide
  misc_feature (1)..(23): combination of 2'-fluoro, 2'-O-methyl, phosphorothioate linked ribonucleotides
ucuagccuggaguugagauccuu

SEQ ID NO: 2193 - RNA, 23 nt, Artificial Sequence
  synthetic polynucleotide
  misc_feature (1)..(23): combination of 2'-fluoro, 2'-O-methyl, phosphorothioate linked ribonucleotides
aucuagccuggaguugagaucuu

SEQ ID NO: 2194 - RNA, 23 nt, Artificial Sequence
  synthetic polynucleotide
  misc_feature (1)..(23): combination of 2'-fluoro, 2'-O-methyl, phosphorothioate linked ribonucleotides
ucucuagccuggaguugagauuu

SEQ ID NO: 2195 - RNA, 23 nt, Artificial Sequence
  synthetic polynucleotide
  misc_feature (1)..(23): combination of 2'-fluoro, 2'-O-methyl, phosphorothioate linked ribonucleotides
uuucuucucuagccuggaguuuu

SEQ ID NO: 2196 - RNA, 23 nt, Artificial Sequence
  synthetic polynucleotide
  misc_feature (1)..(23): combination of 2'-fluoro, 2'-O-methyl, phosphorothioate linked ribonucleotides
ugguugcuuuaacuuucuucuuu

SEQ ID NO: 2197 - RNA, 23 nt, Artificial Sequence
  synthetic polynucleotide
  misc_feature (1)..(23): combination of 2'-fluoro, 2'-O-methyl, phosphorothioate linked ribonucleotides
uugguugcuuuaacuuucuucuu

SEQ ID NO: 2198 - RNA, 23 nt, Artificial Sequence
  synthetic polynucleotide
  misc_feature (1)..(23): combination of 2'-fluoro, 2'-O-methyl, phosphorothioate linked ribonucleotides
auugguugcuuuaacuuucuuuu

SEQ ID NO: 2199 - RNA, 23 nt, Artificial Sequence
  synthetic polynucleotide
  misc_feature (1)..(23): combination of 2'-fluoro, 2'-O-methyl, phosphorothioate linked ribonucleotides
aguugguugcuuuaacuuucuuu

SEQ ID NO: 2200 - RNA, 23 nt, Artificial Sequence
  synthetic polynucleotide
  misc_feature (1)..(23): combination of 2'-fluoro, 2'-O-methyl, phosphorothioate linked ribonucleotides
aaguugguugcuuuaacuuucuu

SEQ ID NO: 2201 - RNA, 23 nt, Artificial Sequence
  synthetic polynucleotide
  misc_feature (1)..(23): combination of 2'-fluoro, 2'-O-methyl, phosphorothioate linked ribonucleotides
aaaguugguugcuuuaacuuuuu

SEQ ID NO: 2202 - RNA, 23 nt, Artificial Sequence
  synthetic polynucleotide
  misc_feature (1)..(23): combination of 2'-fluoro, 2'-O-methyl, phosphorothioate linked ribonucleotides
ugaaguugguugcuuuaacuuuu

SEQ ID NO: 2203 - RNA, 23 nt, Artificial Sequence
  synthetic polynucleotide
  misc_feature (1)..(23): combination of 2'-fluoro, 2'-O-methyl, phosphorothioate linked ribonucleotides
augaaguugguugcuuuaacuuu

SEQ ID NO: 2204 - RNA, 23 nt, Artificial Sequence
  synthetic polynucleotide
  misc_feature (1)..(23): combination of 2'-fluoro, 2'-O-methyl, phosphorothioate linked ribonucleotides
acugaaguugguugcuuuaacuu

SEQ ID NO: 2205 - RNA, 24 nt, Artificial Sequence
  synthetic polynucleotide
  misc_feature (1)..(23): combination of 2'-fluoro, 2'-O-methyl, phosphorothioate linked ribonucleotides
agsgccugaaguugguugcuuuuu

SEQ ID NO: 2206 - RNA, 24 nt, Artificial Sequence
  synthetic polynucleotide
  misc_feature (1)..(23): combination of 2'-fluoro, 2'-O-methyl, phosphorothioate linked ribonucleotides
uusgggccugaaguugguugcuuu

SEQ ID NO: 2207 - RNA, 23 nt, Artificial Sequence
  synthetic polynucleotide
  misc_feature (1)..(23): combination of 2'-fluoro, 2'-O-methyl, phosphorothioate linked ribonucleotides
uauugggccugaaguugguuguu

SEQ ID NO: 2208 - RNA, 23 nt, Artificial Sequence
  synthetic polynucleotide
  misc_feature (1)..(23): combination of 2'-fluoro, 2'-O-methyl, phosphorothioate linked ribonucleotides
auauugggccugaaguugguuuu

SEQ ID NO: 2209 - RNA, 23 nt, Artificial Sequence
  synthetic polynucleotide
  misc_feature (1)..(23): combination of 2'-fluoro, 2'-O-methyl, phosphorothioate linked ribonucleotides
aaauauugggccugaaguugguu

SEQ ID NO: 2210 - RNA, 23 nt, Artificial Sequence
  synthetic polynucleotide
  misc_feature (1)..(23): combination of 2'-fluoro, 2'-O-methyl, phosphorothioate linked ribonucleotides
acaauauugggccugaaguuguu

SEQ ID NO: 2211 - RNA, 23 nt, Artificial Sequence
  synthetic polynucleotide
  misc_feature (1)..(23): combination of 2'-fluoro, 2'-O-methyl, phosphorothioate linked ribonucleotides
uuacaauauugggccugaaguuu

SEQ ID NO: 2212 - RNA, 23 nt, Artificial Sequence
  synthetic polynucleotide
  misc_feature (1)..(23): combination of 2'-fluoro, 2'-O-methyl, phosphorothioate linked ribonucleotides
auuacaauauugggccugaaguu

SEQ ID NO: 2213 - RNA, 23 nt, Artificial Sequence
  synthetic polynucleotide
  misc_feature (1)..(23): combination of 2'-fluoro, 2'-O-methyl, phosphorothioate linked ribonucleotides
aauuacaauauugggccugaauu

SEQ ID NO: 2214 - RNA, 23 nt, Artificial Sequence
  synthetic polynucleotide
  misc_feature (1)..(23): combination of 2'-fluoro, 2'-O-methyl, phosphorothioate linked ribonucleotides
aaauuacaauauugggccugauu

SEQ ID NO: 2215 - RNA, 23 nt, Artificial Sequence
  synthetic polynucleotide
  misc_feature (1)..(23): combination of 2'-fluoro, 2'-O-methyl, phosphorothioate linked ribonucleotides
ugaaauuacaauauugggccuuu

SEQ ID NO: 2216 - RNA, 23 nt, Artificial Sequence
  synthetic polynucleotide
  misc_feature (1)..(23): combination of 2'-fluoro, 2'-O-methyl, phosphorothioate linked ribonucleotides
augaaauuacaauauugggccuu

SEQ ID NO: 2217 - RNA, 23 nt, Artificial Sequence
  synthetic polynucleotide
  misc_feature (1)..(23): combination of 2'-fluoro, 2'-O-methyl, phosphorothioate linked ribonucleotides
aucaccaauaagaagcucaucuu

SEQ ID NO: 2218 - RNA, 23 nt, Artificial Sequence
  synthetic polynucleotide
  misc_feature (1)..(23): combination of 2'-fluoro, 2'-O-methyl, phosphorothioate linked ribonucleotides
agucaccaauaagaagcucauuu

SEQ ID NO: 2219 - RNA, 23 nt, Artificial Sequence
  synthetic polynucleotide
  misc_feature (1)..(23): combination of 2'-fluoro, 2'-O-methyl, phosphorothioate linked ribonucleotides
aagaguggugauuuuccauauuu

SEQ ID NO: 2220 - RNA, 23 nt, Artificial Sequence
  synthetic polynucleotide
  misc_feature (1)..(23): combination of 2'-fluoro, 2'-O-methyl, phosphorothioate linked ribonucleotides
aaagaguggugauuuuccauauu

SEQ ID NO: 2221 - RNA, 23 nt, Artificial Sequence
  synthetic polynucleotide
  misc_feature (1)..(23): combination of 2'-fluoro, 2'-O-methyl, phosphorothioate linked ribonucleotides
aaaagaguggugauuuuccauuu

SEQ ID NO: 2222 - RNA, 23 nt, Artificial Sequence
  synthetic polynucleotide
  misc_feature (1)..(23): combination of 2'-fluoro, 2'-O-methyl, phosphorothioate linked ribonucleotides
acaaagaguggugauuuuccauu

SEQ ID NO: 2223 - RNA, 23 nt, Artificial Sequence
  synthetic polynucleotide
  misc_feature (1)..(23): combination of 2'-fluoro, 2'-O-methyl, phosphorothioate linked ribonucleotides
aauggucccuggguuuuccaguu

SEQ ID NO: 2224 - RNA, 23 nt, Artificial Sequence
  synthetic polynucleotide
  misc_feature (1)..(23): combination of 2'-fluoro, 2'-O-methyl, phosphorothioate linked ribonucleotides
uugauggucccuggguuuuccuu

SEQ ID NO: 2225 - RNA, 23 nt, Artificial Sequence
  synthetic polynucleotide
  misc_feature (1)..(23): combination of 2'-fluoro, 2'-O-methyl, phosphorothioate linked ribonucleotides
uuugauggucccuggguuuucuu

SEQ ID NO: 2226 - RNA, 23 nt, Artificial Sequence
  synthetic polynucleotide
  misc_feature (1)..(23): combination of 2'-fluoro, 2'-O-methyl, phosphorothioate linked ribonucleotides
accacuuugauggucccuggguu

SEQ ID NO: 2227 - RNA, 23 nt, Artificial Sequence
  synthetic polynucleotide
  misc_feature (1)..(23): combination of 2'-fluoro, 2'-O-methyl, phosphorothioate linked ribonucleotides
ucccacuuugauggucccugguu

SEQ ID NO: 2228 - RNA, 23 nt, Artificial Sequence
  synthetic polynucleotide
  misc_feature (1)..(23): combination of 2'-fluoro, 2'-O-methyl, phosphorothioate linked ribonucleotides
aucucccacuuugauggucccuu

SEQ ID NO: 2229 - RNA, 23 nt, Artificial Sequence
  synthetic polynucleotide
  misc_feature (1)..(23): combination of 2'-fluoro, 2'-O-methyl, phosphorothioate linked ribonucleotides
agcagguacacagggucucccuu

SEQ ID NO: 2230 - RNA, 23 nt, Artificial Sequence
  synthetic polynucleotide
  misc_feature (1)..(23): combination of 2'-fluoro, 2'-O-methyl, phosphorothioate linked ribonucleotides
aauuacuggcccagcagguacuu

SEQ ID NO: 2231 - RNA, 23 nt, Artificial Sequence
  synthetic polynucleotide
  misc_feature (1)..(23): combination of 2'-fluoro, 2'-O-methyl, phosphorothioate linked ribonucleotides
auucccauuacuggcccagcauu

SEQ ID NO: 2232 - RNA, 23 nt, Artificial Sequence
  synthetic polynucleotide
  misc_feature (1)..(23): combination of 2'-fluoro, 2'-O-methyl, phosphorothioate linked ribonucleotides
uugucauuuuugagaacauuuuu

SEQ ID NO: 2233 - RNA, 23 nt, Artificial Sequence
  synthetic polynucleotide
  misc_feature (1)..(23): combination of 2'-fluoro, 2'-O-methyl, phosphorothioate linked ribonucleotides
auugucauuuuugagaacauuuu

SEQ ID NO: 2234 - RNA, 23 nt, Artificial Sequence
  synthetic polynucleotide
  misc_feature (1)..(23): combination of 2'-fluoro, 2'-O-methyl, phosphorothioate linked ribonucleotides
ugcuucaaguguugucauuuuuu

SEQ ID NO: 2235 - RNA, 24 nt, Artificial Sequence
  synthetic polynucleotide
  misc_feature (1)..(23): combination of 2'-fluoro, 2'-O-methyl, phosphorothioate linked ribonucleotides
ausgcuucaaguguugucauuuuu

SEQ ID NO: 2236 - RNA, 23 nt, Artificial Sequence
  synthetic polynucleotide
  misc_feature (1)..(23): combination of 2'-fluoro, 2'-O-methyl, phosphorothioate linked ribonucleotides
aaugcuucaaguguugucauuuu

SEQ ID NO: 2237 - RNA, 23 nt, Artificial Sequence
  synthetic polynucleotide
  misc_feature (1)..(23): combination of 2'-fluoro, 2'-O-methyl, phosphorothioate linked ribonucleotides
accaugcuucaaguguugucauu

SEQ ID NO: 2238 - RNA, 23 nt, Artificial Sequence
  synthetic polynucleotide
  misc_feature (1)..(23): combination of 2'-fluoro, 2'-O-methyl, phosphorothioate linked ribonucleotides
aaccaugcuucaaguguugucuu

SEQ ID NO: 2239 - RNA, 23 nt, Artificial Sequence
  synthetic polynucleotide
  misc_feature (1)..(23): combination of 2'-fluoro, 2'-O-methyl, phosphorothioate linked ribonucleotides
acaccaugcuucaaguguuguuu

SEQ ID NO: 2240 - RNA, 23 nt, Artificial Sequence
  synthetic polynucleotide
  misc_feature (1)..(23): combination of 2'-fluoro, 2'-O-methyl, phosphorothioate linked ribonucleotides
ugaaacaccaugcuucaaguguu

SEQ ID NO: 2241 - RNA, 23 nt, Artificial Sequence
  synthetic polynucleotide
  misc_feature (1)..(23): combination of 2'-fluoro, 2'-O-methyl, phosphorothioate linked ribonucleotides
ucugaaacaccaugcuucaaguu

SEQ ID NO: 2242 - RNA, 23 nt, Artificial Sequence
  synthetic polynucleotide
  misc_feature (1)..(23): combination of 2'-fluoro, 2'-O-methyl, phosphorothioate linked ribonucleotides
auugaagcauugagacaccaguu

SEQ ID NO: 2243 - RNA, 23 nt, Artificial Sequence
  synthetic polynucleotide
  misc_feature (1)..(23): combination of 2'-fluoro, 2'-O-methyl, phosphorothioate linked ribonucleotides
aauugaagcauugagacaccauu

SEQ ID NO: 2244 - RNA, 23 nt, Artificial Sequence
  synthetic polynucleotide
  misc_feature (1)..(23): combination of 2'-fluoro, 2'-O-methyl, phosphorothioate linked ribonucleotides
acauugaagcauugagacaccuu

SEQ ID NO: 2245 - RNA, 23 nt, Artificial Sequence
  synthetic polynucleotide
  misc_feature (1)..(23): combination of 2'-fluoro, 2'-O-methyl, phosphorothioate linked ribonucleotides
aacauugaagcauugagacacuu

SEQ ID NO: 2246 - RNA, 23 nt, Artificial Sequence
  synthetic polynucleotide
  misc_feature (1)..(23): combination of 2'-fluoro, 2'-O-methyl, phosphorothioate linked ribonucleotides
agacauugaagcauugagacauu

SEQ ID NO: 2247 - RNA, 23 nt, Artificial Sequence
  synthetic polynucleotide
  misc_feature (1)..(23): combination of 2'-fluoro, 2'-O-methyl, phosphorothioate linked ribonucleotides
ugggacauugaagcauugagauu

SEQ ID NO: 2248 - RNA, 23 nt, Artificial Sequence
  synthetic polynucleotide
  misc_feature (1)..(23): combination of 2'-fluoro, 2'-O-methyl, phosphorothioate linked ribonucleotides
augggacauugaagcauugaguu

SEQ ID NO: 2249 - RNA, 23 nt, Artificial Sequence
  synthetic polynucleotide
  misc_feature (1)..(23): combination of 2'-fluoro, 2'-O-methyl, phosphorothioate linked ribonucleotides
aacugggacauugaagcauuguu

SEQ ID NO: 2250 - RNA, 23 nt, Artificial Sequence
  synthetic polynucleotide
  misc_feature (1)..(23): combination of 2'-fluoro, 2'-O-methyl, phosphorothioate linked ribonucleotides
ugcacugggacauugaagcauuu

SEQ ID NO: 2251 - RNA, 23 nt, Artificial Sequence
  synthetic polynucleotide
  misc_feature (1)..(23): combination of 2'-fluoro, 2'-O-methyl, phosphorothioate linked ribonucleotides
uugcacugggacauugaagcauu

SEQ ID NO: 2252 - RNA, 23 nt, Artificial Sequence
  synthetic polynucleotide
  misc_feature (1)..(23): combination of 2'-fluoro, 2'-O-methyl, phosphorothioate linked ribonucleotides
ucagaauccugucuugucauuuu

SEQ ID NO: 2253 - RNA, 23 nt, Artificial Sequence
  synthetic polynucleotide
  misc_feature (1)..(23): combination of 2'-fluoro, 2'-O-methyl, phosphorothioate linked ribonucleotides
uucagaauccugucuugucauuu

SEQ ID NO: 2254 - RNA, 23 nt, Artificial Sequence
  synthetic polynucleotide
  misc_feature (1)..(23): combination of 2'-fluoro, 2'-O-methyl, phosphorothioate linked ribonucleotides
uuuucagaauccugucuugucuu

SEQ ID NO: 2255 - RNA, 23 nt, Artificial Sequence
  synthetic polynucleotide
  misc_feature (1)..(23): combination of 2'-fluoro, 2'-O-methyl, phosphorothioate linked ribonucleotides
aaguuuucagaauccugucuuuu

SEQ ID NO: 2256 - RNA, 23 nt, Artificial Sequence
  synthetic polynucleotide
  misc_feature (1)..(23): combination of 2'-fluoro, 2'-O-methyl, phosphorothioate linked ribonucleotides
agggaguuuucagaauccuguuu

SEQ ID NO: 2257 - RNA, 23 nt, Artificial Sequence
  synthetic polynucleotide
  misc_feature (1)..(23): combination of 2'-fluoro, 2'-O-methyl, phosphorothioate linked ribonucleotides
uuccauaaucaguuaaacggguu

SEQ ID NO: 2258 - RNA, 23 nt, Artificial Sequence
  synthetic polynucleotide
  misc_feature (1)..(23): combination of 2'-fluoro, 2'-O-methyl, phosphorothioate linked ribonucleotides
acuauuccauaaucaguuaaauu

SEQ ID NO: 2259 - RNA, 23 nt, Artificial Sequence
  synthetic polynucleotide
  misc_feature (1)..(23): combination of 2'-fluoro, 2'-O-methyl, phosphorothioate linked ribonucleotides
aacuauuccauaaucaguuaauu

SEQ ID NO: 2260 - RNA, 23 nt, Artificial Sequence
  synthetic polynucleotide
  misc_feature (1)..(23): combination of 2'-fluoro, 2'-O-methyl, phosphorothioate linked ribonucleotides
agaacuauuccauaaucaguuuu

SEQ ID NO: 2261 - RNA, 23 nt, Artificial Sequence
  synthetic polynucleotide
  misc_feature (1)..(23): combination of 2'-fluoro, 2'-O-methyl, phosphorothioate linked ribonucleotides
aagaacuauuccauaaucaguuu

SEQ ID NO: 2262 - RNA, 23 nt, Artificial Sequence
  synthetic polynucleotide
  misc_feature (1)..(23): combination of 2'-fluoro, 2'-O-methyl, phosphorothioate linked ribonucleotides
aaagaacuauuccauaaucaguu

SEQ ID NO: 2263 - RNA, 23 nt, Artificial Sequence
  synthetic polynucleotide
  misc_feature (1)..(23): combination of 2'-fluoro, 2'-O-methyl, phosphorothioate linked ribonucleotides
agaaagaacuauuccauaaucuu

SEQ ID NO: 2264 - RNA, 23 nt, Artificial Sequence
  synthetic polynucleotide
  misc_feature (1)..(23): combination of 2'-fluoro, 2'-O-methyl, phosphorothioate linked ribonucleotides
aagaaagaacuauuccauaauuu

SEQ ID NO: 2265 - RNA, 23 nt, Artificial Sequence
  synthetic polynucleotide
  misc_feature (1)..(23): combination of 2'-fluoro, 2'-O-methyl, phosphorothioate linked ribonucleotides
agugguagugacaggaugcaauu

SEQ ID NO: 2266 - RNA, 23 nt, Artificial Sequence
  synthetic polynucleotide
  misc_feature (1)..(23): combination of 2'-fluoro, 2'-O-methyl, phosphorothioate linked ribonucleotides
auuccagccauauuugggguguu

SEQ ID NO: 2267 - RNA, 23 nt, Artificial Sequence
  synthetic polynucleotide
  misc_feature (1)..(23): combination of 2'-fluoro, 2'-O-methyl, phosphorothioate linked ribonucleotides
acauuccagccauauuugggguu

SEQ ID NO: 2268 - RNA, 23 nt, Artificial Sequence
  synthetic polynucleotide
  misc_feature (1)..(23): combination of 2'-fluoro, 2'-O-methyl, phosphorothioate linked ribonucleotides
aaagcuagcccggggcuugaguu

SEQ ID NO: 2269 - RNA, 23 nt, Artificial Sequence
  synthetic polynucleotide
  misc_feature (1)..(23): combination of 2'-fluoro, 2'-O-methyl, phosphorothioate linked ribonucleotides
aaaagcuagcccggggcuugauu

SEQ ID NO: 2270 - RNA, 23 nt, Artificial Sequence
  synthetic polynucleotide
  misc_feature (1)..(23): combination of 2'-fluoro, 2'-O-methyl, phosphorothioate linked ribonucleotides
ucaaaagcuagcccggggcuuuu

SEQ ID NO: 2271 - RNA, 23 nt, Artificial Sequence
  synthetic polynucleotide
  misc_feature (1)..(23): combination of 2'-fluoro, 2'-O-methyl, phosphorothioate linked ribonucleotides
uucaaaagcuagcccggggcuuu

SEQ ID NO: 2272 - RNA, 23 nt, Artificial Sequence
  synthetic polynucleotide
  misc_feature (1)..(23): combination of 2'-fluoro, 2'-O-methyl, phosphorothioate linked ribonucleotides
uuucaaaagcuagcccggggcuu

SEQ ID NO: 2273 - RNA, 23 nt, Artificial Sequence
  synthetic polynucleotide
  misc_feature (1)..(23): combination of 2'-fluoro, 2'-O-methyl, phosphorothioate linked ribonucleotides
aauuucaaaagcuagcccggguu

SEQ ID NO: 2274 - RNA, 23 nt, Artificial Sequence
  synthetic polynucleotide
  misc_feature (1)..(23): combination of 2'-fluoro, 2'-O-methyl, phosphorothioate linked ribonucleotides
  misc_feature (1)..(23): combination of 2'-fluoro, 2'-O-methyl, phosphorothioate linked ribonucleotides
augccauuucaaaagcuagccuu

SEQ ID NO: 2275 - RNA, 23 nt, Artificial Sequence
  synthetic polynucleotide
  misc_feature (1)..(23): combination of 2'-fluoro, 2'-O-methyl, phosphorothioate linked ribonucleotides
aaaggucaccucagucuuuauuu

SEQ ID NO: 2276 - RNA, 24 nt, Artificial Sequence
  synthetic polynucleotide
  misc_feature (1)..(23): combination of 2'-fluoro, 2'-O-methyl, phosphorothioate linked ribonucleotides
ausggaaaauuaauaucugcaguu

SEQ ID NO: 2277 - RNA, 23 nt, Artificial Sequence
  synthetic polynucleotide
  misc_feature (1)..(23): combination of 2'-fluoro, 2'-O-methyl, phosphorothioate linked ribonucleotides
aaucuauggaaaauuaauaucuu

SEQ ID NO: 2278 - RNA, 23 nt, Artificial Sequence
  synthetic polynucleotide
  misc_feature (1)..(23): combination of 2'-fluoro, 2'-O-methyl, phosphorothioate linked ribonucleotides
agaucuauggaaaauuaauauuu

SEQ ID NO: 2279 - RNA, 23 nt, Artificial Sequence
  synthetic polynucleotide
  misc_feature (1)..(23): combination of 2'-fluoro, 2'-O-methyl, phosphorothioate linked ribonucleotides
auccagaucuauggaaaauuauu

SEQ ID NO: 2280 - RNA, 23 nt, Artificial Sequence
  synthetic polynucleotide
  misc_feature (1)..(23): combination of 2'-fluoro, 2'-O-methyl, phosphorothioate linked ribonucleotides
aauccagaucuauggaaaauuuu

SEQ ID NO: 2281 - RNA, 23 nt, Artificial Sequence
  synthetic polynucleotide
  misc_feature (1)..(23): combination of 2'-fluoro, 2'-O-methyl, phosphorothioate linked ribonucleotides
agauccagaucuauggaaaauuu

SEQ ID NO: 2282 - RNA, 23 nt, Artificial Sequence
  synthetic polynucleotide
  misc_feature (1)..(23): combination of 2'-fluoro, 2'-O-methyl, phosphorothioate linked ribonucleotides
acagauccagaucuauggaaauu

SEQ ID NO: 2283 - RNA, 23 nt, Artificial Sequence
  synthetic polynucleotide
  misc_feature (1)..(23): combination of 2'-fluoro, 2'-O-methyl, phosphorothioate linked ribonucleotides
uccaaugcugucugagaagcauu

SEQ ID NO: 2284 - RNA, 23 nt, Artificial Sequence
  synthetic polynucleotide
  misc_feature (1)..(23): combination of 2'-fluoro, 2'-O-methyl, phosphorothioate linked ribonucleotides
auccaaugcugucugagaagcuu

SEQ ID NO: 2285 - RNA, 23 nt, Artificial Sequence
  synthetic polynucleotide
  misc_feature (1)..(23): combination of 2'-fluoro, 2'-O-methyl, phosphorothioate linked ribonucleotides
aggaaauccaaugcugucugauu

SEQ ID NO: 2286 - RNA, 23 nt, Artificial Sequence
  synthetic polynucleotide
  misc_feature (1)..(23): combination of 2'-fluoro, 2'-O-methyl, phosphorothioate linked ribonucleotides
uaggaaauccaaugcugucuguu

SEQ ID NO: 2287 - RNA, 23 nt, Artificial Sequence
  synthetic polynucleotide
  misc_feature (1)..(23): combination of 2'-fluoro, 2'-O-methyl, phosphorothioate linked ribonucleotides
uuaggaaauccaaugcugucuuu

SEQ ID NO: 2288 - RNA, 23 nt, Artificial Sequence
  synthetic polynucleotide
  misc_feature (1)..(23): combination of 2'-fluoro, 2'-O-methyl, phosphorothioate linked ribonucleotides
acuccugagcaccuuuaggaauu

SEQ ID NO: 2289 - RNA, 23 nt, Artificial Sequence
  synthetic polynucleotide
  misc_feature (1)..(23): combination of 2'-fluoro, 2'-O-methyl, phosphorothioate linked ribonucleotides
uggcaaggauccagggguccuuu

SEQ ID NO: 2290 - RNA, 23 nt, Artificial Sequence
  synthetic polynucleotide
  misc_feature (1)..(23): combination of 2'-fluoro, 2'-O-methyl, phosphorothioate linked ribonucleotides
aggaauggcaaggauccaggguu

SEQ ID NO: 2291 - RNA, 23 nt, Artificial Sequence
  synthetic polynucleotide
  misc_feature (1)..(23): combination of 2'-fluoro, 2'-O-methyl, phosphorothioate linked ribonucleotides
aggggaauggcaaggauccaguu

SEQ ID NO: 2292 - RNA, 23 nt, Artificial Sequence
  synthetic polynucleotide
  misc_feature (1)..(23): combination of 2'-fluoro, 2'-O-methyl, phosphorothioate linked ribonucleotides
ugaggggaauggcaaggauccuu

SEQ ID NO: 2293 - RNA, 23 nt, Artificial Sequence
  synthetic polynucleotide
  misc_feature (1)..(23): combination of 2'-fluoro, 2'-O-methyl, phosphorothioate linked ribonucleotides
augaggggaauggcaaggaucuu

SEQ ID NO: 2294 - RNA, 23 nt, Artificial Sequence
  synthetic polynucleotide
  misc_feature (1)..(23): combination of 2'-fluoro, 2'-O-methyl, phosphorothioate linked ribonucleotides
uagcugaggggaauggcaagguu

SEQ ID NO: 2295 - RNA, 23 nt, Artificial Sequence
  synthetic polynucleotide
  misc_feature (1)..(23): combination of 2'-fluoro, 2'-O-methyl, phosphorothioate linked ribonucleotides
uuagcugaggggaauggcaaguu

SEQ ID NO: 2296 - RNA, 23 nt, Artificial Sequence
  synthetic polynucleotide
  misc_feature (1)..(23): combination of 2'-fluoro, 2'-O-methyl, phosphorothioate linked ribonucleotides
ucauuagcugaggggaauggcuu

SEQ ID NO: 2297 - RNA, 23 nt, Artificial Sequence
  synthetic polynucleotide
  misc_feature (1)..(23): combination of 2'-fluoro, 2'-O-methyl, phosphorothioate linked ribonucleotides
agucauuagcugaggggaauguu

SEQ ID NO: 2298 - RNA, 23 nt, Artificial Sequence
  synthetic polynucleotide
  misc_feature (1)..(23): combination of 2'-fluoro, 2'-O-methyl, phosphorothioate linked ribonucleotides
acuggagaaggagcacuccguuu

SEQ ID NO: 2299 - RNA, 23 nt, Artificial Sequence
  synthetic polynucleotide
  misc_feature (1)..(23): combination of 2'-fluoro, 2'-O-methyl, phosphorothioate linked ribonucleotides
uuucccccuuuaaagguuuucuu

SEQ ID NO: 2300 - RNA, 23 nt, Artificial Sequence
  synthetic polynucleotide
  misc_feature (1)..(23): combination of 2'-fluoro, 2'-O-methyl, phosphorothioate linked ribonucleotides
auuuuaaacaacugacauauguu

SEQ ID NO: 2301 - RNA, 23 nt, Artificial Sequence
  synthetic polynucleotide
  misc_feature (1)..(23): combination of 2'-fluoro, 2'-O-methyl, phosphorothioate linked ribonucleotides
uauuggguuuuaaacaacugauu

SEQ ID NO: 2302 - RNA, 23 nt, Artificial Sequence
  synthetic polynucleotide
  misc_feature (1)..(23): combination of 2'-fluoro, 2'-O-methyl, phosphorothioate linked ribonucleotides
aauauuggguuuuaaacaacuuu

SEQ ID NO: 2303 - RNA, 23 nt, Artificial Sequence
  synthetic polynucleotide
  misc_feature (1)..(23): combination of 2'-fluoro, 2'-O-methyl, phosphorothioate linked ribonucleotides
aaaucagagcagugcguccuuuu

SEQ ID NO: 2304 - RNA, 23 nt, Artificial Sequence
  synthetic polynucleotide
  misc_feature (1)..(23): combination of 2'-fluoro, 2'-O-methyl, phosphorothioate linked ribonucleotides
aaaaagcuagcccggggcuuguu

SEQ ID NO: 2305 - RNA, 23 nt, Artificial Sequence
  synthetic polynucleotide
  misc_feature (1)..(23): combination of 2'-fluoro, 2'-O-methyl, phosphorothioate linked ribonucleotides
auuucaaaagcuagcccgggguu

SEQ ID NO: 2306 - RNA, 23 nt, Artificial Sequence
  synthetic polynucleotide
  misc_feature (1)..(23): combination of 2'-fluoro, 2'-O-methyl, phosphorothioate linked ribonucleotides
uuccugaaggucaccucagucuu

SEQ ID NO: 2307 - RNA, 23 nt, Artificial Sequence
  synthetic polynucleotide
  misc_feature (1)..(23): combination of 2'-fluoro, 2'-O-methyl, phosphorothioate linked ribonucleotides
aagaucuauggaaaauuaauauu

SEQ ID NO: 2308 - RNA, 23 nt, Artificial Sequence
  synthetic polynucleotide
  misc_feature (1)..(23): combination of 2'-fluoro, 2'-O-methyl, phosphorothioate linked ribonucleotides
aagauccagaucuauggaaaauu

SEQ ID NO: 2309 - RNA, 23 nt, Artificial Sequence
  synthetic polynucleotide
  misc_feature (1)..(23): combination of 2'-fluoro, 2'-O-methyl, phosphorothioate linked ribonucleotides
aaauccaaugcugucugagaauu

SEQ ID NO: 2310 - RNA, 23 nt, Artificial Sequence
  synthetic polynucleotide
  misc_feature (1)..(23): combination of 2'-fluoro, 2'-O-methyl, phosphorothioate linked ribonucleotides
auccugagcaccuuuaggaaauu

SEQ ID NO: 2311 - RNA, 23 nt, Artificial Sequence
  synthetic polynucleotide
  misc_feature (1)..(23): combination of 2'-fluoro, 2'-O-methyl, phosphorothioate linked ribonucleotides
agggaauggcaaggauccagguu

SEQ ID NO: 2312 - RNA, 23 nt, Artificial Sequence
  synthetic polynucleotide
  misc_feature (1)..(23): combination of 2'-fluoro, 2'-O-methyl, phosphorothioate linked ribonucleotides
agcugaggggaauggcaaggauu

SEQ ID NO: 2313 - RNA, 23 nt, Artificial Sequence
  synthetic polynucleotide
  misc_feature (1)..(23): combination of 2'-fluoro, 2'-O-methyl, phosphorothioate linked ribonucleotides
aucauuagcugaggggaaugguu

SEQ ID NO: 2314 - RNA, 23 nt, Artificial Sequence
  synthetic polynucleotide
  misc_feature (1)..(23): combination of 2'-fluoro, 2'-O-methyl, phosphorothioate linked ribonucleotides
uuuucccccuuuaaagguuuuuu

SEQ ID NO: 2315 - RNA, 23 nt, Artificial Sequence
  synthetic polynucleotide
  misc_feature (1)..(23): combination of 2'-fluoro, 2'-O-methyl, phosphorothioate linked ribonucleotides
uagauauuggguuuuaaacaauu

SEQ ID NO: 2316 - RNA, 23 nt, Artificial Sequence
  synthetic polynucleotide
  misc_feature (1)..(23): combination of 2'-fluoro, 2'-O-methyl, phosphorothioate linked ribonucleotides
auacuucaucagaucuuagaguu

SEQ ID NO: 2317 - RNA, 23 nt, Artificial Sequence
  synthetic polynucleotide
  misc_feature (1)..(23): combination of 2'-fluoro, 2'-O-methyl, phosphorothioate linked ribonucleotides
auauacuucaucagaucuuaguu

SEQ ID NO: 2318 - RNA, 23 nt, Artificial Sequence
  synthetic polynucleotide
  misc_feature (1)..(23): combination of 2'-fluoro, 2'-O-methyl, phosphorothioate linked ribonucleotides
aauauacuucaucagaucuuauu

SEQ ID NO: 2319 - RNA, 23 nt, Artificial Sequence
  synthetic polynucleotide
  misc_feature (1)..(23): combination of 2'-fluoro, 2'-O-methyl, phosphorothioate linked ribonucleotides
aaauauacuucaucagaucuuuu

SEQ ID NO: 2320 - RNA, 23 nt, Artificial Sequence
  synthetic polynucleotide
  misc_feature (1)..(23): combination of 2'-fluoro, 2'-O-methyl, phosphorothioate linked ribonucleotides
aaauaaaaaauauacuucaucuu

SEQ ID NO: 2321 - RNA, 23 nt, Artificial Sequence
  synthetic polynucleotide
  misc_feature (1)..(23): combination of 2'-fluoro, 2'-O-methyl, phosphorothioate linked ribonucleotides
aaggacaaaauggcaauaaaauu

SEQ ID NO: 2322 - RNA, 23 nt, Artificial Sequence
  synthetic polynucleotide
  misc_feature (1)..(23): combination of 2'-fluoro, 2'-O-methyl, phosphorothioate linked ribonucleotides
aaaggacaaaauggcaauaaauu

SEQ ID NO: 2323 - RNA, 23 nt, Artificial Sequence
  synthetic polynucleotide
  misc_feature (1)..(23): combination of 2'-fluoro, 2'-O-methyl, phosphorothioate linked ribonucleotides
aaaaggacaaaauggcaauaauu

SEQ ID NO: 2324 - RNA, 23 nt, Artificial Sequence
  synthetic polynucleotide
  misc_feature (1)..(23): combination of 2'-fluoro, 2'-O-methyl, phosphorothioate linked ribonucleotides
aucaaaggacaaaauggcaauuu

SEQ ID NO: 2325 - RNA, 23 nt, Artificial Sequence
  synthetic polynucleotide
  misc_feature (1)..(23): combination of 2'-fluoro, 2'-O-methyl, phosphorothioate linked ribonucleotides
auuuagucaacuucccaauauuu

SEQ ID NO: 2326 - RNA, 23 nt, Artificial Sequence
  synthetic polynucleotide
  misc_feature (1)..(23): combination of 2'-fluoro, 2'-O-methyl, phosphorothioate linked ribonucleotides
ucaaguuuagucaacuucccauu

SEQ ID NO: 2327 - RNA, 23 nt, Artificial Sequence
  synthetic polynucleotide
  misc_feature (1)..(23): combination of 2'-fluoro, 2'-O-methyl, phosphorothioate linked ribonucleotides
uucaaguuuagucaacuucccuu

SEQ ID NO: 2328 - RNA, 23 nt, Artificial Sequence
  synthetic polynucleotide
  misc_feature (1)..(23): combination of 2'-fluoro, 2'-O-methyl, phosphorothioate linked ribonucleotides
uuucaaguuuagucaacuuccuu

SEQ ID NO: 2329 - RNA, 23 nt, Artificial Sequence
  synthetic polynucleotide
  misc_feature (1)..(23): combination of 2'-fluoro, 2'-O-methyl, phosphorothioate linked ribonucleotides
uagcuuccauuuauucacaguuu

SEQ ID NO: 2330 - RNA, 23 nt, Artificial Sequence
  synthetic polynucleotide
  misc_feature (1)..(23): combination of 2'-fluoro, 2'-O-methyl, phosphorothioate linked ribonucleotides
aaaguagcuuccauuuauucauu

SEQ ID NO: 2331 - RNA, 23 nt, Artificial Sequence
  synthetic polynucleotide
  misc_feature (1)..(23): combination of 2'-fluoro, 2'-O-methyl, phosphorothioate linked ribonucleotides
agucaaaguagcuuccauuuauu

SEQ ID NO: 2332 - RNA, 23 nt, Artificial Sequence
  synthetic polynucleotide
  misc_feature (1)..(23): combination of 2'-fluoro, 2'-O-methyl, phosphorothioate linked ribonucleotides
uagucaaaguagcuuccauuuuu

SEQ ID NO: 2333 - RNA, 23 nt, Artificial Sequence
  synthetic polynucleotide
  misc_feature (1)..(23): combination of 2'-fluoro, 2'-O-methyl, phosphorothioate linked ribonucleotides
ugaaacuagucaaaguagcuuuu

SEQ ID NO: 2334 - RNA, 23 nt, Artificial Sequence
  synthetic polynucleotide
  misc_feature (1)..(23): combination of 2'-fluoro, 2'-O-methyl, phosphorothioate linked ribonucleotides
augaaacuagucaaaguagcuuu

SEQ ID NO: 2335 - RNA, 23 nt, Artificial Sequence
  synthetic polynucleotide
  misc_feature (1)..(23): combination of 2'-fluoro, 2'-O-methyl, phosphorothioate linked ribonucleotides
aaacuggagaaggagcacuccuu

SEQ ID NO: 2336 - RNA, 23 nt, Artificial Sequence
  synthetic polynucleotide
  misc_feature (1)..(23): combination of 2'-fluoro, 2'-O-methyl, phosphorothioate linked ribonucleotides
acuuuucccccuuuaaagguuuu

SEQ ID NO: 2337 - RNA, 23 nt, Artificial Sequence
  synthetic polynucleotide
  misc_feature (1)..(23): combination of 2'-fluoro, 2'-O-methyl, phosphorothioate linked ribonucleotides
uccuuuucccccuuuaaagguuu

SEQ ID NO: 2338 - RNA, 23 nt, Artificial Sequence
  synthetic polynucleotide
  misc_feature (1)..(23): combination of 2'-fluoro, 2'-O-methyl, phosphorothioate linked ribonucleotides
ucaaaggacaaaauggcaauauu

SEQ ID NO: 2339 - RNA, 23 nt, Artificial Sequence
  synthetic polynucleotide
  misc_feature (1)..(23): combination of 2'-fluoro, 2'-O-methyl, phosphorothioate linked ribonucleotides
uuuucaaguuuagucaacuucuu

SEQ ID NO: 2340 - RNA, 23 nt, Artificial Sequence
  synthetic polynucleotide
  misc_feature (1)..(23): combination of 2'-fluoro, 2'-O-methyl, phosphorothioate linked ribonucleotides
uuuuucaaguuuagucaacuuuu

SEQ ID NO: 2341 - RNA, 23 nt, Artificial Sequence
  synthetic polynucleotide
  misc_feature (1)..(23): combination of 2'-fluoro, 2'-O-methyl, phosphorothioate linked ribonucleotides
ucugaaacuagucaaaguagcuu

SEQ ID NO: 2342 - RNA, 23 nt, Artificial Sequence
  synthetic polynucleotide
  misc_feature (1)..(23): combination of 2'-fluoro, 2'-O-methyl, phosphorothioate linked ribonucleotides
uguaggcugcacugagagucauu

SEQ ID NO: 2343 - RNA, 23 nt, Artificial Sequence
  synthetic polynucleotide
  misc_feature (1)..(23): combination of 2'-fluoro, 2'-O-methyl, phosphorothioate linked ribonucleotides
aacugcauuuguggugggcguuu

SEQ ID NO: 2344 - RNA, 23 nt, Artificial Sequence
  synthetic polynucleotide
  misc_feature (1)..(23): combination of 2'-fluoro, 2'-O-methyl, phosphorothioate linked ribonucleotides
agaagcugguuauccacuggguu

SEQ ID NO: 2345 - RNA, 23 nt, Artificial Sequence
  synthetic polynucleotide
  misc_feature (1)..(23): combination of 2'-fluoro, 2'-O-methyl, phosphorothioate linked ribonucleotides
aaacaagucugcuauuugauguu

SEQ ID NO: 2346 - RNA, 23 nt, Artificial Sequence
  synthetic polynucleotide
  misc_feature (1)..(23): combination of 2'-fluoro, 2'-O-methyl, phosphorothioate linked ribonucleotides
aggaacaagucugcuauuugauu

SEQ ID NO: 2347 - RNA, 23 nt, Artificial Sequence
  synthetic polynucleotide
  misc_feature (1)..(23): combination of 2'-fluoro, 2'-O-methyl, phosphorothioate linked ribonucleotides
uuaacuuucuucucuagccuguu

SEQ ID NO: 2348 - RNA, 23 nt, Artificial Sequence
  synthetic polynucleotide
  misc_feature (1)..(23): combination of 2'-fluoro, 2'-O-methyl, phosphorothioate linked ribonucleotides
uuuaacuuucuucucuagccuuu

SEQ ID NO: 2349 - RNA, 23 nt, Artificial Sequence
  synthetic polynucleotide
  misc_feature (1)..(23): combination of 2'-fluoro, 2'-O-methyl, phosphorothioate linked ribonucleotides
aauauugggccugaaguugguuu

SEQ ID NO: 2350 - RNA, 23 nt, Artificial Sequence
  synthetic polynucleotide
  misc_feature (1)..(23): combination of 2'-fluoro, 2'-O-methyl, phosphorothioate linked ribonucleotides
aacgucaccaauaagaagcucuu

SEQ ID NO: 2351 - RNA, 23 nt, Artificial Sequence
  synthetic polynucleotide
  misc_feature (1)..(23): combination of 2'-fluoro, 2'-O-methyl, phosphorothioate linked ribonucleotides
uuccacgucaccaauaagaaguu

SEQ ID NO: 2352 - RNA, 23 nt, Artificial Sequence
  synthetic polynucleotide
  misc_feature (1)..(23): combination of 2'-fluoro, 2'-O-methyl, phosphorothioate linked ribonucleotides
aguuccacgucaccaauaagauu

SEQ ID NO: 2353 - RNA, 23 nt, Artificial Sequence
  synthetic polynucleotide
  misc_feature (1)..(23): combination of 2'-fluoro, 2'-O-methyl, phosphorothioate linked ribonucleotides
uuucaguuccacgucaccaauuu

SEQ ID NO: 2354 - RNA, 23 nt, Artificial Sequence
  synthetic polynucleotide
  misc_feature (1)..(23): combination of 2'-fluoro, 2'-O-methyl, phosphorothioate linked ribonucleotides
uuaaaaugcaucuggaacaaguu

SEQ ID NO: 2355 - RNA, 23 nt, Artificial Sequence
  synthetic polynucleotide
  misc_feature (1)..(23): combination of 2'-fluoro, 2'-O-methyl, phosphorothioate linked ribonucleotides
aguuaaaaugcaucuggaacauu

SEQ ID NO: 2356 - RNA, 23 nt, Artificial Sequence
  synthetic polynucleotide
  misc_feature (1)..(23): combination of 2'-fluoro, 2'-O-methyl, phosphorothioate linked ribonucleotides
auaacucuucaguguuuccaguu

SEQ ID NO: 2357 - RNA, 23 nt, Artificial Sequence
  synthetic polynucleotide
  misc_feature (1)..(23): combination of 2'-fluoro, 2'-O-methyl, phosphorothioate linked ribonucleotides
aauaacucuucaguguuuccauu

SEQ ID NO: 2358 - RNA, 23 nt, Artificial Sequence
  synthetic polynucleotide
  misc_feature (1)..(23): combination of 2'-fluoro, 2'-O-methyl, phosphorothioate linked ribonucleotides
aucacacuggcgauaacucuuuu

SEQ ID NO: 2359 - RNA, 23 nt, Artificial Sequence
  synthetic polynucleotide
  misc_feature (1)..(23): combination of 2'-fluoro, 2'-O-methyl, phosphorothioate linked ribonucleotides
agucacacuggcgauaacucuuu

SEQ ID NO: 2360 - RNA, 23 nt, Artificial Sequence
  synthetic polynucleotide
  misc_feature (1)..(23): combination of 2'-fluoro, 2'-O-methyl, phosphorothioate linked ribonucleotides
aguggugauuuuccauauaacuu

SEQ ID NO: 2361 - RNA, 23 nt, Artificial Sequence
  synthetic polynucleotide
  misc_feature (1)..(23): combination of 2'-fluoro, 2'-O-methyl, phosphorothioate linked ribonucleotides
agucccuggguuuuccagcacuu

SEQ ID NO: 2362 - RNA, 23 nt, Artificial Sequence
  synthetic polynucleotide
  misc_feature (1)..(23): combination of 2'-fluoro, 2'-O-methyl, phosphorothioate linked ribonucleotides
uggucccuggguuuuccagcauu

SEQ ID NO: 2363 - RNA, 23 nt, Artificial Sequence
  synthetic polynucleotide
  misc_feature (1)..(23): combination of 2'-fluoro, 2'-O-methyl, phosphorothioate linked ribonucleotides
auggucccuggguuuuccagcuu

SEQ ID NO: 2364 - RNA, 23 nt, Artificial Sequence
  synthetic polynucleotide
  misc_feature (1)..(23): combination of 2'-fluoro, 2'-O-methyl, phosphorothioate linked ribonucleotides
auuugauggucccuggguuuuuu

SEQ ID NO: 2365 - RNA, 23 nt, Artificial Sequence
  synthetic polynucleotide
  misc_feature (1)..(23): combination of 2'-fluoro, 2'-O-methyl, phosphorothioate linked ribonucleotides
acuuugauggucccuggguuuuu

SEQ ID NO: 2366 - RNA, 23 nt, Artificial Sequence
  synthetic polynucleotide
  misc_feature (1)..(23): combination of 2'-fluoro, 2'-O-methyl, phosphorothioate linked ribonucleotides
aacuuugauggucccuggguuuu

SEQ ID NO: 2367 - RNA, 23 nt, Artificial Sequence
  synthetic polynucleotide
  misc_feature (1)..(23): combination of 2'-fluoro, 2'-O-methyl, phosphorothioate linked ribonucleotides
acacuuugauggucccuggguuu

SEQ ID NO: 2368 - RNA, 23 nt, Artificial Sequence
  synthetic polynucleotide
  misc_feature (1)..(23): combination of 2'-fluoro, 2'-O-methyl, phosphorothioate linked ribonucleotides
aagguacacagggucucccacuu

SEQ ID NO: 2369 - RNA, 23 nt, Artificial Sequence
  synthetic polynucleotide
  misc_feature (1)..(23): combination of 2'-fluoro, 2'-O-methyl, phosphorothioate linked ribonucleotides
aguucccauuacuggcccagcuu

SEQ ID NO: 2370 - RNA, 23 nt, Artificial Sequence
  synthetic polynucleotide
  misc_feature (1)..(23): combination of 2'-fluoro, 2'-O-methyl, phosphorothioate linked ribonucleotides
auucaaguguugucauuuuuguu

SEQ ID NO: 2371 - RNA, 23 nt, Artificial Sequence
  synthetic polynucleotide
  misc_feature (1)..(23): combination of 2'-fluoro, 2'-O-methyl, phosphorothioate linked ribonucleotides
acaugcuucaaguguugucauuu

SEQ ID NO: 2372 - RNA, 23 nt, Artificial Sequence
  synthetic polynucleotide
  misc_feature (1)..(23): combination of 2'-fluoro, 2'-O-methyl, phosphorothioate linked ribonucleotides
augaaacaccaugcuucaaguuu

SEQ ID NO: 2373 - RNA, 23 nt, Artificial Sequence
  synthetic polynucleotide
  misc_feature (1)..(23): combination of 2'-fluoro, 2'-O-methyl, phosphorothioate linked ribonucleotides
aaaugugaaaaucacaaauuuuu

SEQ ID NO: 2374 - RNA, 23 nt, Artificial Sequence
  synthetic polynucleotide
  misc_feature (1)..(23): combination of 2'-fluoro, 2'-O-methyl, phosphorothioate linked ribonucleotides
acacugggacauugaagcauuuu

SEQ ID NO: 2375 - RNA, 23 nt, Artificial Sequence
  synthetic polynucleotide
  misc_feature (1)..(23): combination of 2'-fluoro, 2'-O-methyl, phosphorothioate linked ribonucleotides
aagaauccugucuugucauuuuu

SEQ ID NO: 2376 - RNA, 23 nt, Artificial Sequence
  synthetic polynucleotide
  misc_feature (1)..(23): combination of 2'-fluoro, 2'-O-methyl, phosphorothioate linked ribonucleotides
agagaaagaacuauuccauaauu

SEQ ID NO: 2377 - RNA, 23 nt, Artificial Sequence
  synthetic polynucleotide
  misc_feature (1)..(23): combination of 2'-fluoro, 2'-O-methyl, phosphorothioate linked ribonucleotides
aggagaaagaacuauuccauauu

SEQ ID NO: 2378 - RNA, 23 nt, Artificial Sequence
  synthetic polynucleotide
  misc_feature (1)..(23): combination of 2'-fluoro, 2'-O-methyl, phosphorothioate linked ribonucleotides
aagcaggagaaagaacuauucuu

SEQ ID NO: 2379 - RNA, 23 nt, Artificial Sequence
  synthetic polynucleotide
  misc_feature (1)..(23): combination of 2'-fluoro, 2'-O-methyl, phosphorothioate linked ribonucleotides
aaagcaggagaaagaacuauuuu

SEQ ID NO: 2380 - RNA, 23 nt, Artificial Sequence
  synthetic polynucleotide
  misc_feature (1)..(23): combination of 2'-fluoro, 2'-O-methyl, phosphorothioate linked ribonucleotides
aagugguagugacaggaugcauu

SEQ ID NO: 2381 - RNA, 23 nt, Artificial Sequence
  synthetic polynucleotide
  misc_feature (1)..(23): combination of 2'-fluoro, 2'-O-methyl, phosphorothioate linked ribonucleotides
agagugguagugacaggaugcuu

SEQ ID NO: 2382 - RNA, 23 nt, Artificial Sequence
  synthetic polynucleotide
  misc_feature (1)..(23): combination of 2'-fluoro, 2'-O-methyl, phosphorothioate linked ribonucleotides
acauuucaaaagcuagcccgguu

SEQ ID NO: 2383 - RNA, 23 nt, Artificial Sequence
  synthetic polynucleotide
  misc_feature (1)..(23): combination of 2'-fluoro, 2'-O-methyl, phosphorothioate linked ribonucleotides
accauuucaaaagcuagcccguu

SEQ ID NO: 2384 - RNA, 23 nt, Artificial Sequence
  synthetic polynucleotide
  misc_feature (1)..(23): combination of 2'-fluoro, 2'-O-methyl, phosphorothioate linked ribonucleotides
acugaaggucaccucagucuuuu

SEQ ID NO: 2385 - RNA, 23 nt, Artificial Sequence
  synthetic polynucleotide
  misc_feature (1)..(23): combination of 2'-fluoro, 2'-O-methyl, phosphorothioate linked ribonucleotides
agugcuuccugaaggucaccuuu

SEQ ID NO: 2386 - RNA, 23 nt, Artificial Sequence
  synthetic polynucleotide
  misc_feature (1)..(23): combination of 2'-fluoro, 2'-O-methyl, phosphorothioate linked ribonucleotides
aggccagauccagaucuaugguu

SEQ ID NO: 2387 - RNA, 23 nt, Artificial Sequence
  synthetic polynucleotide
  misc_feature (1)..(23): combination of 2'-fluoro, 2'-O-methyl, phosphorothioate linked ribonucleotides
ugagcaccuuuaggaaauccauu

SEQ ID NO: 2388 - RNA, 23 nt, Artificial Sequence
  synthetic polynucleotide
  misc_feature (1)..(23): combination of 2'-fluoro, 2'-O-methyl, phosphorothioate linked ribonucleotides
acugagcaccuuuaggaaaucuu

SEQ ID NO: 2389 - RNA, 23 nt, Artificial Sequence
  synthetic polynucleotide
  misc_feature (1)..(23): combination of 2'-fluoro, 2'-O-methyl, phosphorothioate linked ribonucleotides
uccuccugagcaccuuuaggauu

SEQ ID NO: 2390 - RNA, 23 nt, Artificial Sequence
  synthetic polynucleotide
  misc_feature (1)..(23): combination of 2'-fluoro, 2'-O-methyl, phosphorothioate linked ribonucleotides
aaaggauccagggguccuccauu

SEQ ID NO: 2391 - RNA, 23 nt, Artificial Sequence
  synthetic polynucleotide
  misc_feature (1)..(23): combination of 2'-fluoro, 2'-O-methyl, phosphorothioate linked ribonucleotides
acaaggauccagggguccuccuu

SEQ ID NO: 2392 - RNA, 23 nt, Artificial Sequence
  synthetic polynucleotide
  misc_feature (1)..(23): combination of 2'-fluoro, 2'-O-methyl, phosphorothioate linked ribonucleotides
agcaaggauccagggguccucuu

SEQ ID NO: 2393 - RNA, 23 nt, Artificial Sequence
  synthetic polynucleotide
  misc_feature (1)..(23): combination of 2'-fluoro, 2'-O-methyl, phosphorothioate linked ribonucleotides
aacuggagaaggagcacuccguu

SEQ ID NO: 2394 - RNA, 23 nt, Artificial Sequence
  synthetic polynucleotide
  misc_feature (1)..(23): combination of 2'-fluoro, 2'-O-methyl, phosphorothioate linked ribonucleotides
aucagagcagugcguccuucuuu

SEQ ID NO: 2395 - RNA, 23 nt, Artificial Sequence
  synthetic polynucleotide
  misc_feature (1)..(23): combination of 2'-fluoro, 2'-O-methyl, phosphorothioate linked ribonucleotides
acccuuccgggccaaucagaguu

SEQ ID NO: 2396 - RNA, 23 nt, Artificial Sequence
  synthetic polynucleotide
  misc_feature (1)..(23): combination of 2'-fluoro, 2'-O-methyl, phosphorothioate linked ribonucleotides
aacccuuccgggccaaucagauu

SEQ ID NO: 2397 - RNA, 23 nt, Artificial Sequence
  synthetic polynucleotide
  misc_feature (1)..(23): combination of 2'-fluoro, 2'-O-methyl, phosphorothioate linked ribonucleotides
aaacccuuccgggccaaucaguu

SEQ ID NO: 2398 - RNA, 23 nt, Artificial Sequence
  synthetic polynucleotide
  misc_feature (1)..(23): combination of 2'-fluoro, 2'-O-methyl, phosphorothioate linked ribonucleotides
aggaaggugcggccuuuggccuu

SEQ ID NO: 2399 - RNA, 23 nt, Artificial Sequence
  synthetic polynucleotide
  misc_feature (1)..(23): combination of 2'-fluoro, 2'-O-methyl, phosphorothioate linked ribonucleotides
auggcuggcuucuccgcgagguu

SEQ ID NO: 2400 - RNA, 23 nt, Artificial Sequence
  synthetic polynucleotide
  misc_feature (1)..(23): combination of 2'-fluoro, 2'-O-methyl, phosphorothioate linked ribonucleotides
acgcccauggcuggcuucuccuu

SEQ ID NO: 2401 - RNA, 23 nt, Artificial Sequence
  synthetic polynucleotide
  misc_feature (1)..(23): combination of 2'-fluoro, 2'-O-methyl, phosphorothioate linked ribonucleotides
agcgcccauggcuggcuucucuu

SEQ ID NO: 2402 - RNA, 23 nt, Artificial Sequence
  synthetic polynucleotide
  misc_feature (1)..(23): combination of 2'-fluoro, 2'-O-methyl, phosphorothioate linked ribonucleotides
auguuucccuccugguugaucuu

SEQ ID NO: 2403 - RNA, 23 nt, Artificial Sequence
  synthetic polynucleotide
  misc_feature (1)..(23): combination of 2'-fluoro, 2'-O-methyl, phosphorothioate linked ribonucleotides
acgagguuccuggcgagcaguuu

SEQ ID NO: 2404 - RNA, 23 nt, Artificial Sequence
  synthetic polynucleotide
  misc_feature (1)..(23): combination of 2'-fluoro, 2'-O-methyl, phosphorothioate linked ribonucleotides
accaggcgagguuccuggcgauu

SEQ ID NO: 2405 - RNA, 23 nt, Artificial Sequence
  synthetic polynucleotide
  misc_feature (1)..(23): combination of 2'-fluoro, 2'-O-methyl, phosphorothioate linked ribonucleotides
agaccaggcgagguuccuggcuu

SEQ ID NO: 2406 - RNA, 23 nt, Artificial Sequence
  synthetic polynucleotide
  misc_feature (1)..(23): combination of 2'-fluoro, 2'-O-methyl, phosphorothioate linked ribonucleotides
aaucaggaccaggcgagguucuu

SEQ ID NO: 2407 - RNA, 23 nt, Artificial Sequence
  synthetic polynucleotide
  misc_feature (1)..(23): combination of 2'-fluoro, 2'-O-methyl, phosphorothioate linked ribonucleotides
ugagagucagggugucaccauuu

SEQ ID NO: 2408 - RNA, 23 nt, Artificial Sequence
  synthetic polynucleotide
  misc_feature (1)..(23): combination of 2'-fluoro, 2'-O-methyl, phosphorothioate linked ribonucleotides
augagagucagggugucaccauu

SEQ ID NO: 2409 - RNA, 23 nt, Artificial Sequence
  synthetic polynucleotide
  misc_feature (1)..(23): combination of 2'-fluoro, 2'-O-methyl, phosphorothioate linked ribonucleotides
ugcacugagagucagggugucuu

SEQ ID NO: 2410 - RNA, 23 nt, Artificial Sequence
  synthetic polynucleotide
  misc_feature (1)..(23): combination of 2'-fluoro, 2'-O-methyl, phosphorothioate linked ribonucleotides
agcugcacugagagucaggguuu

SEQ ID NO: 2411 - RNA, 23 nt, Artificial Sequence
  synthetic polynucleotide
  misc_feature (1)..(23): combination of 2'-fluoro, 2'-O-methyl, phosphorothioate linked ribonucleotides
agcugguuauccacugggcgguu

SEQ ID NO: 2412 - RNA, 23 nt, Artificial Sequence
  synthetic polynucleotide
  misc_feature (1)..(23): combination of 2'-fluoro, 2'-O-methyl, phosphorothioate linked ribonucleotides
agcucgaagugcaccaggcgguu

SEQ ID NO: 2413 - RNA, 23 nt, Artificial Sequence
  synthetic polynucleotide
  misc_feature (1)..(23): combination of 2'-fluoro, 2'-O-methyl, phosphorothioate linked ribonucleotides
aggcucgaagugcaccaggcguu

SEQ ID NO: 2414 - RNA, 23 nt, Artificial Sequence
  synthetic polynucleotide
  misc_feature (1)..(23): combination of 2'-fluoro, 2'-O-methyl, phosphorothioate linked ribonucleotides
aaggcucgaagugcaccaggcuu

SEQ ID NO: 2415 - RNA, 23 nt, Artificial Sequence
  synthetic polynucleotide
  misc_feature (1)..(23): combination of 2'-fluoro, 2'-O-methyl, phosphorothioate linked ribonucleotides
ugaggcucgaagugcaccagguu

SEQ ID NO: 2416 - RNA, 23 nt, Artificial Sequence
  synthetic polynucleotide
  misc_feature (1)..(23): combination of 2'-fluoro, 2'-O-methyl, phosphorothioate linked ribonucleotides
augaggcucgaagugcaccaguu

SEQ ID NO: 2417 - RNA, 23 nt, Artificial Sequence
  synthetic polynucleotide
  misc_feature (1)..(23): combination of 2'-fluoro, 2'-O-methyl, phosphorothioate linked ribonucleotides
ugugaggcucgaagugcaccauu

SEQ ID NO: 2418 - RNA, 23 nt, Artificial Sequence
  synthetic polynucleotide
  misc_feature (1)..(23): combination of 2'-fluoro, 2'-O-methyl, phosphorothioate linked ribonucleotides
augugaggcucgaagugcaccuu

SEQ ID NO: 2419 - RNA, 23 nt, Artificial Sequence
  synthetic polynucleotide
  misc_feature (1)..(23): combination of 2'-fluoro, 2'-O-methyl, phosphorothioate linked ribonucleotides
aaugugaggcucgaagugcacuu

SEQ ID NO: 2420 - RNA, 23 nt, Artificial Sequence
  synthetic polynucleotide
  misc_feature (1)..(23): combination of 2'-fluoro, 2'-O-methyl, phosphorothioate linked ribonucleotides
acaugugaggcucgaagugcauu

SEQ ID NO: 2421 - RNA, 23 nt, Artificial Sequence
  synthetic polynucleotide
  misc_feature (1)..(23): combination of 2'-fluoro, 2'-O-methyl, phosphorothioate linked ribonucleotides
agcaugugaggcucgaagugcuu

SEQ ID NO: 2422 - RNA, 23 nt, Artificial Sequence
  synthetic polynucleotide
  misc_feature (1)..(23): combination of 2'-fluoro, 2'-O-methyl, phosphorothioate linked ribonucleotides
ucgcaugugaggcucgaaguguu

SEQ ID NO: 2423 - RNA, 23 nt, Artificial Sequence
  synthetic polynucleotide
  misc_feature (1)..(23): combination of 2'-fluoro, 2'-O-methyl, phosphorothioate linked ribonucleotides
aucgcaugugaggcucgaaguuu

SEQ ID NO: 2424 - RNA, 23 nt, Artificial Sequence
  synthetic polynucleotide
  misc_feature (1)..(23): combination of 2'-fluoro, 2'-O-methyl, phosphorothioate linked ribonucleotides
agucgcaugugaggcucgaaguu

SEQ ID NO: 2425 - RNA, 23 nt, Artificial Sequence
  synthetic polynucleotide
  misc_feature (1)..(23): combination of 2'-fluoro, 2'-O-methyl, phosphorothioate linked ribonucleotides
aggucgcaugugaggcucgaauu

SEQ ID NO: 2426 - RNA, 23 nt, Artificial Sequence
  synthetic polynucleotide
  misc_feature (1)..(23): combination of 2'-fluoro, 2'-O-methyl, phosphorothioate linked ribonucleotides
ucggucgcaugugaggcucgauu

SEQ ID NO: 2427 - RNA, 23 nt, Artificial Sequence
  synthetic polynucleotide
  misc_feature (1)..(23): combination of 2'-fluoro, 2'-O-methyl, phosphorothioate linked ribonucleotides
aucggucgcaugugaggcucguu

SEQ ID NO: 2428 - RNA, 23 nt, Artificial Sequence
  synthetic polynucleotide
  misc_feature (1)..(23): combination of 2'-fluoro, 2'-O-methyl, phosphorothioate linked ribonucleotides
agucucggucgcaugugaggcuu

SEQ ID NO: 2429 - RNA, 23 nt, Artificial Sequence
  synthetic polynucleotide
  misc_feature (1)..(23): combination of 2'-fluoro, 2'-O-methyl, phosphorothioate linked ribonucleotides
aacgccucagaaaggaucaaguu

SEQ ID NO: 2430 - RNA, 23 nt, Artificial Sequence
  synthetic polynucleotide
  misc_feature (1)..(23): combination of 2'-fluoro, 2'-O-methyl, phosphorothioate linked ribonucleotides
acuggaguugagauccgccaguu

SEQ ID NO: 2431 - RNA, 23 nt, Artificial Sequence
  synthetic polynucleotide
  misc_feature (1)..(23): combination of 2'-fluoro, 2'-O-methyl, phosphorothioate linked ribonucleotides
accuggaguugagauccgccauu

SEQ ID NO: 2432 - RNA, 23 nt, Artificial Sequence
  synthetic polynucleotide
  misc_feature (1)..(23): combination of 2'-fluoro, 2'-O-methyl, phosphorothioate linked ribonucleotides
aauccucugcauagacaucgcuu

SEQ ID NO: 2433 - RNA, 23 nt, Artificial Sequence
  synthetic polynucleotide
  misc_feature (1)..(23): combination of 2'-fluoro, 2'-O-methyl, phosphorothioate linked ribonucleotides
agaauccucugcauagacaucuu

SEQ ID NO: 2434 - RNA, 23 nt, Artificial Sequence
  synthetic polynucleotide
  misc_feature (1)..(23): combination of 2'-fluoro, 2'-O-methyl, phosphorothioate linked ribonucleotides
aaagaauccucugcauagacauu

SEQ ID NO: 2435 - RNA, 23 nt, Artificial Sequence
  synthetic polynucleotide
  misc_feature (1)..(23): combination of 2'-fluoro, 2'-O-methyl, phosphorothioate linked ribonucleotides
acaagaauccucugcauagacuu

SEQ ID NO: 2436 - RNA, 23 nt, Artificial Sequence
  synthetic polynucleotide
  misc_feature (1)..(23): combination of 2'-fluoro, 2'-O-methyl, phosphorothioate linked ribonucleotides
accaagaauccucugcauagauu

SEQ ID NO: 2437 - RNA, 23 nt, Artificial Sequence
  synthetic polynucleotide
  misc_feature (1)..(23): combination of 2'-fluoro, 2'-O-methyl, phosphorothioate linked ribonucleotides
ucccaagaauccucugcauaguu

SEQ ID NO: 2438 - RNA, 23 nt, Artificial Sequence
  synthetic polynucleotide
  misc_feature (1)..(23): combination of 2'-fluoro, 2'-O-methyl, phosphorothioate linked ribonucleotides
aaucuggaacaagccaucaccuu

SEQ ID NO: 2439 - RNA, 23 nt, Artificial Sequence
  synthetic polynucleotide
  misc_feature (1)..(23): combination of 2'-fluoro, 2'-O-methyl, phosphorothioate linked ribonucleotides
acaucuggaacaagccaucacuu

SEQ ID NO: 2440 - RNA, 23 nt, Artificial Sequence
  synthetic polynucleotide
  misc_feature (1)..(23): combination of 2'-fluoro, 2'-O-methyl, phosphorothioate linked ribonucleotides
aaaugcaucuggaacaagccauu

SEQ ID NO: 2441 - RNA, 23 nt, Artificial Sequence
  synthetic polynucleotide
  misc_feature (1)..(23): combination of 2'-fluoro, 2'-O-methyl, phosphorothioate linked ribonucleotides
agguccacugugguuaaaauguu

SEQ ID NO: 2442 - RNA, 23 nt, Artificial Sequence
  synthetic polynucleotide
  misc_feature (1)..(23): combination of 2'-fluoro, 2'-O-methyl, phosphorothioate linked ribonucleotides
auggguccacugugguuaaaauu

SEQ ID NO: 2443 - RNA, 23 nt, Artificial Sequence
  synthetic polynucleotide
  misc_feature (1)..(23): combination of 2'-fluoro, 2'-O-methyl, phosphorothioate linked ribonucleotides
ucuggguccacugugguuaaauu

SEQ ID NO: 2444 - RNA, 23 nt, Artificial Sequence
  synthetic polynucleotide
  misc_feature (1)..(23): combination of 2'-fluoro, 2'-O-methyl, phosphorothioate linked ribonucleotides
aauacugcccaaagagugguguu

SEQ ID NO: 2445 - RNA, 23 nt, Artificial Sequence
  synthetic polynucleotide
  misc_feature (1)..(23): combination of 2'-fluoro, 2'-O-methyl, phosphorothioate linked ribonucleotides
aaauacugcccaaagagugguuu

SEQ ID NO: 2446 - RNA, 23 nt, Artificial Sequence
  synthetic polynucleotide
  misc_feature (1)..(23): combination of 2'-fluoro, 2'-O-methyl, phosphorothioate linked ribonucleotides
agcacaaaauacugcccaaaguu

SEQ ID NO: 2447 - RNA, 23 nt, Artificial Sequence
  synthetic polynucleotide
  misc_feature (1)..(23): combination of 2'-fluoro, 2'-O-methyl, phosphorothioate linked ribonucleotides
aagcacaaaauacugcccaaauu

SEQ ID NO: 2448 - RNA, 23 nt, Artificial Sequence
  synthetic polynucleotide
  misc_feature (1)..(23): combination of 2'-fluoro, 2'-O-methyl, phosphorothioate linked ribonucleotides
acagcacaaaauacugcccaauu

SEQ ID NO: 2449 - RNA, 23 nt, Artificial Sequence
  synthetic polynucleotide
  misc_feature (1)..(23): combination of 2'-fluoro, 2'-O-methyl, phosphorothioate linked ribonucleotides
uccagcacaaaauacugcccauu

SEQ ID NO: 2450 - RNA, 23 nt, Artificial Sequence
  synthetic polynucleotide
  misc_feature (1)..(23): combination of 2'-fluoro, 2'-O-methyl, phosphorothioate linked ribonucleotides
uuuccagcacaaaauacugccuu

SEQ ID NO: 2451 - RNA, 23 nt, Artificial Sequence
  synthetic polynucleotide
  misc_feature (1)..(23): combination of 2'-fluoro, 2'-O-methyl, phosphorothioate linked ribonucleotides
uggguuuuccagcacaaaauauu

SEQ ID NO: 2452 - RNA, 23 nt, Artificial Sequence
  synthetic polynucleotide
  misc_feature (1)..(23): combination of 2'-fluoro, 2'-O-methyl, phosphorothioate linked ribonucleotides
auggguuuuccagcacaaaauuu

SEQ ID NO: 2453 - RNA, 23 nt, Artificial Sequence
  synthetic polynucleotide
  misc_feature (1)..(23): combination of 2'-fluoro, 2'-O-methyl, phosphorothioate linked ribonucleotides
uaauauuccaggacauacgguuu

SEQ ID NO: 2454 - RNA, 23 nt, Artificial Sequence
  synthetic polynucleotide
  misc_feature (1)..(23): combination of 2'-fluoro, 2'-O-methyl, phosphorothioate linked ribonucleotides
auaauauuccaggacauacgguu

SEQ ID NO: 2455 - RNA, 23 nt, Artificial Sequence
  synthetic polynucleotide
  misc_feature (1)..(23): combination of 2'-fluoro, 2'-O-methyl, phosphorothioate linked ribonucleotides
aucuaauauuccaggacauacuu

SEQ ID NO: 2456 - RNA, 23 nt, Artificial Sequence
  synthetic polynucleotide
  misc_feature (1)..(23): combination of 2'-fluoro, 2'-O-methyl, phosphorothioate linked ribonucleotides
aaucuaauauuccaggacauauu

SEQ ID NO: 2457 - RNA, 23 nt, Artificial Sequence
  synthetic polynucleotide
  misc_feature (1)..(23): combination of 2'-fluoro, 2'-O-methyl, phosphorothioate linked ribonucleotides
acaucuaauauuccaggacauuu

SEQ ID NO: 2458 - RNA, 23 nt, Artificial Sequence
  synthetic polynucleotide
  misc_feature (1)..(23): combination of 2'-fluoro, 2'-O-methyl, phosphorothioate linked ribonucleotides
agcaucuaauauuccaggacauu

SEQ ID NO: 2459 - RNA, 23 nt, Artificial Sequence
  synthetic polynucleotide
  misc_feature (1)..(23): combination of 2'-fluoro, 2'-O-methyl, phosphorothioate linked ribonucleotides
aggcaucuaauauuccaggacuu

SEQ ID NO: 2460 - RNA, 23 nt, Artificial Sequence
  synthetic polynucleotide
  misc_feature (1)..(23): combination of 2'-fluoro, 2'-O-methyl, phosphorothioate linked ribonucleotides
aaggcaucuaauauuccaggauu

SEQ ID NO: 2461 - RNA, 23 nt, Artificial Sequence
  synthetic polynucleotide
  misc_feature (1)..(23): combination of 2'-fluoro, 2'-O-methyl, phosphorothioate linked ribonucleotides
aaaggcaucuaauauuccagguu

SEQ ID NO: 2462 - RNA, 23 nt, Artificial Sequence
  synthetic polynucleotide
  misc_feature (1)..(23): combination of 2'-fluoro, 2'-O-methyl, phosphorothioate linked ribonucleotides
aaaaggcaucuaauauuccaguu

SEQ ID NO: 2463 - RNA, 23 nt, Artificial Sequence
  synthetic polynucleotide
  misc_feature (1)..(23): combination of 2'-fluoro, 2'-O-methyl, phosphorothioate linked ribonucleotides
ucucaguucugaaacaccauguu

SEQ ID NO: 2464 - RNA, 23 nt, Artificial Sequence
  synthetic polynucleotide
  misc_feature (1)..(23): combination of 2'-fluoro, 2'-O-methyl, phosphorothioate linked ribonucleotides
aucucaguucugaaacaccauuu

SEQ ID NO: 2465 - RNA, 23 nt, Artificial Sequence
  synthetic polynucleotide
  misc_feature (1)..(23): combination of 2'-fluoro, 2'-O-methyl, phosphorothioate linked ribonucleotides
agucucaguucugaaacaccauu

SEQ ID NO: 2466 - RNA, 23 nt, Artificial Sequence
  synthetic polynucleotide
  misc_feature (1)..(23): combination of 2'-fluoro, 2'-O-methyl, phosphorothioate linked ribonucleotides
aggucucaguucugaaacaccuu

SEQ ID NO: 2467 - RNA, 23 nt, Artificial Sequence
  synthetic polynucleotide
  misc_feature (1)..(23): combination of 2'-fluoro, 2'-O-methyl, phosphorothioate linked ribonucleotides
ugaaucacuuuucuucuccucuu

SEQ ID NO: 2468 - RNA, 23 nt, Artificial Sequence
  synthetic polynucleotide
  misc_feature (1)..(23): combination of 2'-fluoro, 2'-O-methyl, phosphorothioate linked ribonucleotides
ucacugaaucacuuuucuucuuu

SEQ ID NO: 2469 - RNA, 23 nt, Artificial Sequence
  synthetic polynucleotide
  misc_feature (1)..(23): combination of 2'-fluoro, 2'-O-methyl, phosphorothioate linked ribonucleotides
aucacugaaucacuuuucuucuu

SEQ ID NO: 2470 - RNA, 23 nt, Artificial Sequence
  synthetic polynucleotide
  misc_feature (1)..(23): combination of 2'-fluoro, 2'-O-methyl, phosphorothioate linked ribonucleotides
aaaaucacugaaucacuuuucuu

SEQ ID NO: 2471 - RNA, 23 nt, Artificial Sequence
  synthetic polynucleotide
  misc_feature (1)..(23): combination of 2'-fluoro, 2'-O-methyl, phosphorothioate linked ribonucleotides
augaaaucacugaaucacuuuuu

SEQ ID NO: 2472 - RNA, 23 nt, Artificial Sequence
  synthetic polynucleotide
  misc_feature (1)..(23): combination of 2'-fluoro, 2'-O-methyl, phosphorothioate linked ribonucleotides
acuuuaaagguuuucaguaguuu

SEQ ID NO: 2473 - RNA, 23 nt, Artificial Sequence
  synthetic polynucleotide
  misc_feature (1)..(23): combination of 2'-fluoro, 2'-O-methyl, phosphorothioate linked ribonucleotides
acccuuuaaagguuuucaguauu

SEQ ID NO: 2474 - RNA, 23 nt, Artificial Sequence
  synthetic polynucleotide
  misc_feature (1)..(23): combination of 2'-fluoro, 2'-O-methyl, phosphorothioate linked ribonucleotides
aucagaucuuagaguuauacauu

SEQ ID NO: 2475 - RNA, 25 nt, Artificial Sequence
  synthetic polynucleotide
ucaucagaucuuagaguuauasusu

SEQ ID NO: 2476 - RNA, 23 nt, Artificial Sequence
  synthetic polynucleotide
  misc_feature (1)..(23): combination of 2'-fluoro, 2'-O-methyl, phosphorothioate linked ribonucleotides
uucaucagaucuuagaguuauuu

SEQ ID NO: 2477 - RNA, 23 nt, Artificial Sequence
  synthetic polynucleotide
  misc_feature (1)..(23): combination of 2'-fluoro, 2'-O-methyl, phosphorothioate linked ribonucleotides
auucaucagaucuuagaguuauu

SEQ ID NO: 2478 - RNA, 23 nt, Artificial Sequence
  synthetic polynucleotide
  misc_feature (1)..(23): combination of 2'-fluoro, 2'-O-methyl, phosphorothioate linked ribonucleotides
acuucaucagaucuuagaguuuu

SEQ ID NO: 2479 - RNA, 23 nt, Artificial Sequence
  synthetic polynucleotide
  misc_feature (1)..(23): combination of 2'-fluoro, 2'-O-methyl, phosphorothioate linked ribonucleotides
uacuucaucagaucuuagaguuu

SEQ ID NO: 2480 - RNA, 23 nt, Artificial Sequence
  synthetic polynucleotide
  misc_feature (1)..(23): combination of 2'-fluoro, 2'-O-methyl, phosphorothioate linked ribonucleotides
augaacccuuccgggccaaucuu

SEQ ID NO: 2481 - RNA, 23 nt, Artificial Sequence
  synthetic polynucleotide
  misc_feature (1)..(23): combination of 2'-fluoro, 2'-O-methyl, phosphorothioate linked ribonucleotides
auuuggccccgagcccaaagguu

SEQ ID NO: 2482 - RNA, 23 nt, Artificial Sequence
  synthetic polynucleotide
  misc_feature (1)..(23): combination of 2'-fluoro, 2'-O-methyl, phosphorothioate linked ribonucleotides
agccuuuggccccgagcccaauu

SEQ ID NO: 2483 - RNA, 23 nt, Artificial Sequence
  synthetic polynucleotide
  misc_feature (1)..(23): combination of 2'-fluoro, 2'-O-methyl, phosphorothioate linked ribonucleotides
aggccgcugggggaaggugcguu

SEQ ID NO: 2484 - RNA, 23 nt, Artificial Sequence
  synthetic polynucleotide
  misc_feature (1)..(23): combination of 2'-fluoro, 2'-O-methyl, phosphorothioate linked ribonucleotides
uucuccgcgagguggcggcgguu

SEQ ID NO: 2485 - RNA, 23 nt, Artificial Sequence
  synthetic polynucleotide
  misc_feature (1)..(23): combination of 2'-fluoro, 2'-O-methyl, phosphorothioate linked ribonucleotides
aacaaagcgcgccagcgcggauu

SEQ ID NO: 2486 - RNA, 23 nt, Artificial Sequence
  synthetic polynucleotide
  misc_feature (1)..(23): combination of 2'-fluoro, 2'-O-methyl, phosphorothioate linked ribonucleotides
agacaaagcgcgccagcgcgguu

SEQ ID NO: 2487 - RNA, 23 nt, Artificial Sequence
  synthetic polynucleotide
  misc_feature (1)..(23): combination of 2'-fluoro, 2'-O-methyl, phosphorothioate linked ribonucleotides
aggacaaagcgcgccagcgcguu

SEQ ID NO: 2488 - RNA, 23 nt, Artificial Sequence
  synthetic polynucleotide
  misc_feature (1)..(23): combination of 2'-fluoro, 2'-O-methyl, phosphorothioate linked ribonucleotides
acgcgaggaggacaaagcgcguu

SEQ ID NO: 2489 - RNA, 23 nt, Artificial Sequence
  synthetic polynucleotide
  misc_feature (1)..(23): combination of 2'-fluoro, 2'-O-methyl, phosphorothioate linked ribonucleotides
ugcgcgaggaggacaaagcgcuu

SEQ ID NO: 2490 - RNA, 23 nt, Artificial Sequence
  synthetic polynucleotide
  misc_feature (1)..(23): combination of 2'-fluoro, 2'-O-methyl, phosphorothioate linked ribonucleotides
uugcgcgaggaggacaaagcguu

SEQ ID NO: 2491 - RNA, 23 nt, Artificial Sequence
  synthetic polynucleotide
  misc_feature (1)..(23): combination of 2'-fluoro, 2'-O-methyl, phosphorothioate linked ribonucleotides
auugcgcgaggaggacaaagcuu

SEQ ID NO: 2492 - RNA, 23 nt, Artificial Sequence
  synthetic polynucleotide
  misc_feature (1)..(23): combination of 2'-fluoro, 2'-O-methyl, phosphorothioate linked ribonucleotides
aauugcgcgaggaggacaaaguu

SEQ ID NO: 2493 - RNA, 23 nt, Artificial Sequence
  synthetic polynucleotide
  misc_feature (1)..(23): combination of 2'-fluoro, 2'-O-methyl, phosphorothioate linked ribonucleotides
agauugcgcgaggaggacaaauu

SEQ ID NO: 2494 - RNA, 23 nt, Artificial Sequence
  synthetic polynucleotide
  misc_feature (1)..(23): combination of 2'-fluoro, 2'-O-methyl, phosphorothioate linked ribonucleotides
agggauugcgcgaggaggacauu

SEQ ID NO: 2495 - RNA, 23 nt, Artificial Sequence
  synthetic polynucleotide
  misc_feature (1)..(23): combination of 2'-fluoro, 2'-O-methyl, phosphorothioate linked ribonucleotides
acgggauugcgcgaggaggacuu

SEQ ID NO: 2496 - RNA, 23 nt, Artificial Sequence
  synthetic polynucleotide
  misc_feature (1)..(23): combination of 2'-fluoro, 2'-O-methyl, phosphorothioate linked ribonucleotides
accgggauugcgcgaggaggauu

SEQ ID NO: 2497 - RNA, 23 nt, Artificial Sequence
  synthetic polynucleotide
  misc_feature (1)..(23): combination of 2'-fluoro, 2'-O-methyl, phosphorothioate linked ribonucleotides
agccgggauugcgcgaggagguu

SEQ ID NO: 2498 - RNA, 23 nt, Artificial Sequence
  synthetic polynucleotide
  misc_feature (1)..(23): combination of 2'-fluoro, 2'-O-methyl, phosphorothioate linked ribonucleotides
accgggccgggauugcgcgaguu

SEQ ID NO: 2499 - RNA, 23 nt, Artificial Sequence
  synthetic polynucleotide
  misc_feature (1)..(23): combination of 2'-fluoro, 2'-O-methyl, phosphorothioate linked ribonucleotides
acacccgggccgggauugcgcuu

SEQ ID NO: 2500 - RNA, 23 nt, Artificial Sequence
  synthetic polynucleotide
  misc_feature (1)..(23): combination of 2'-fluoro, 2'-O-methyl, phosphorothioate linked ribonucleotides
accacccgggccgggauugcguu

SEQ ID NO: 2501 - RNA, 23 nt, Artificial Sequence
  synthetic polynucleotide
  misc_feature (1)..(23): combination of 2'-fluoro, 2'-O-methyl, phosphorothioate linked ribonucleotides
agccacccgggccgggauugcuu

SEQ ID NO: 2502 - RNA, 23 nt, Artificial Sequence
  synthetic polynucleotide
  misc_feature (1)..(23): combination of 2'-fluoro, 2'-O-methyl, phosphorothioate linked ribonucleotides
aaaccccgagccacccgggccuu

SEQ ID NO: 2503 - RNA, 23 nt, Artificial Sequence
  synthetic polynucleotide
  misc_feature (1)..(23): combination of 2'-fluoro, 2'-O-methyl, phosphorothioate linked ribonucleotides
acaaccccgagccacccgggcuu

SEQ ID NO: 2504 - RNA, 23 nt, Artificial Sequence
  synthetic polynucleotide
  misc_feature (1)..(23): combination of 2'-fluoro, 2'-O-methyl, phosphorothioate linked ribonucleotides
agcaaccccgagccacccggguu

SEQ ID NO: 2505 - RNA, 23 nt, Artificial Sequence
  synthetic polynucleotide
  misc_feature (1)..(23): combination of 2'-fluoro, 2'-O-methyl, phosphorothioate linked ribonucleotides
agcccagcgcggcaaccccgauu

SEQ ID NO: 2506 - RNA, 23 nt, Artificial Sequence
  synthetic polynucleotide
  misc_feature (1)..(23): combination of 2'-fluoro, 2'-O-methyl, phosphorothioate linked ribonucleotides
aucaggcccagcgcggcaaccuu

SEQ ID NO: 2507 - RNA, 23 nt, Artificial Sequence
  synthetic polynucleotide
  misc_feature (1)..(23): combination of 2'-fluoro, 2'-O-methyl, phosphorothioate linked ribonucleotides
agcggucaggcccagcgcggcuu

SEQ ID NO: 2508 - RNA, 23 nt, Artificial Sequence
  synthetic polynucleotide
  misc_feature (1)..(23): combination of 2'-fluoro, 2'-O-methyl, phosphorothioate linked ribonucleotides
aaccgcggucaggcccagcgcuu

SEQ ID NO: 2509 - RNA, 23 nt, Artificial Sequence
  synthetic polynucleotide
  misc_feature (1)..(23): combination of 2'-fluoro, 2'-O-methyl, phosphorothioate linked ribonucleotides
acgccaccgcggucaggcccauu

SEQ ID NO: 2510 - RNA, 23 nt, Artificial Sequence
  synthetic polynucleotide
  misc_feature (1)..(23): combination of 2'-fluoro, 2'-O-methyl, phosphorothioate linked ribonucleotides
agcgccaccgcggucaggcccuu

SEQ ID NO: 2511 - RNA, 23 nt, Artificial Sequence
  synthetic polynucleotide
  misc_feature (1)..(23): combination of 2'-fluoro, 2'-O-methyl, phosphorothioate linked ribonucleotides
agcaguaaccauguuucccucuu

SEQ ID NO: 2512 - RNA, 23 nt, Artificial Sequence
  synthetic polynucleotide
  misc_feature (1)..(23): combination of 2'-fluoro, 2'-O-methyl, phosphorothioate linked ribonucleotides
acgagcaguaaccauguuuccuu

SEQ ID NO: 2513 - RNA, 23 nt, Artificial Sequence
  synthetic polynucleotide
  misc_feature (1)..(23): combination of 2'-fluoro, 2'-O-methyl, phosphorothioate linked ribonucleotides
agcgagcaguaaccauguuucuu

SEQ ID NO: 2514 - RNA, 23 nt, Artificial Sequence
  synthetic polynucleotide
  misc_feature (1)..(23): combination of 2'-fluoro, 2'-O-methyl, phosphorothioate linked ribonucleotides
uggcgagcaguaaccauguuuuu

SEQ ID NO: 2515 - RNA, 23 nt, Artificial Sequence
  synthetic polynucleotide
  misc_feature (1)..(23): combination of 2'-fluoro, 2'-O-methyl, phosphorothioate linked ribonucleotides
auggcgagcaguaaccauguuuu

SEQ ID NO: 2516 - RNA, 23 nt, Artificial Sequence
  synthetic polynucleotide
  misc_feature (1)..(23): combination of 2'-fluoro, 2'-O-methyl, phosphorothioate linked ribonucleotides
acuggcgagcaguaaccauguuu

SEQ ID NO: 2517 - RNA, 23 nt, Artificial Sequence
  synthetic polynucleotide
  misc_feature (1)..(23): combination of 2'-fluoro, 2'-O-methyl, phosphorothioate linked ribonucleotides
agguuccuggcgagcaguaacuu

SEQ ID NO: 2518 - RNA, 23 nt, Artificial Sequence
  synthetic polynucleotide
  misc_feature (1)..(23): combination of 2'-fluoro, 2'-O-methyl, phosphorothioate linked ribonucleotides
ucaccaucgcaggucagggaauu

SEQ ID NO: 2519 - RNA, 23 nt, Artificial Sequence
  synthetic polynucleotide
  misc_feature (1)..(23): combination of 2'-fluoro, 2'-O-methyl, phosphorothioate linked ribonucleotides
aagggugucaccaucgcagguuu

SEQ ID NO: 2520 - RNA, 23 nt, Artificial Sequence
  synthetic polynucleotide
  misc_feature (1)..(23): combination of 2'-fluoro, 2'-O-methyl, phosphorothioate linked ribonucleotides
aguccuuuguguaggcugcacuu

SEQ ID NO: 2521 - RNA, 23 nt, Artificial Sequence
  synthetic polynucleotide
  misc_feature (1)..(23): combination of 2'-fluoro, 2'-O-methyl, phosphorothioate linked ribonucleotides
agguccuuuguguaggcugcauu

SEQ ID NO: 2522 - RNA, 23 nt, Artificial Sequence
  synthetic polynucleotide
  misc_feature (1)..(23): combination of 2'-fluoro, 2'-O-methyl, phosphorothioate linked ribonucleotides
asagguccuuuguguaggcuguu

SEQ ID NO: 2523 - RNA, 23 nt, Artificial Sequence
  synthetic polynucleotide
  misc_feature (1)..(23): combination of 2'-fluoro, 2'-O-methyl, phosphorothioate linked ribonucleotides
aguagguccuuuguguaggcuuu

SEQ ID NO: 2524 - RNA, 23 nt, Artificial Sequence
  synthetic polynucleotide
  misc_feature (1)..(23): combination of 2'-fluoro, 2'-O-methyl, phosphorothioate linked ribonucleotides
uaguagguccuuuguguaggcuu

SEQ ID NO: 2525 - RNA, 23 nt, Artificial Sequence
  synthetic polynucleotide
  misc_feature (1)..(23): combination of 2'-fluoro, 2'-O-methyl, phosphorothioate linked ribonucleotides
auaguagguccuuuguguagguu

SEQ ID NO: 2526 - RNA, 23 nt, Artificial Sequence
  synthetic polynucleotide
  misc_feature (1)..(23): combination of 2'-fluoro, 2'-O-methyl, phosphorothioate linked ribonucleotides
aguaguagguccuuuguguaguu

SEQ ID NO: 2527 - RNA, 23 nt, Artificial Sequence
  synthetic polynucleotide
  misc_feature (1)..(23): combination of 2'-fluoro, 2'-O-methyl, phosphorothioate linked ribonucleotides
agcaguaguagguccuuuguguu

SEQ ID NO: 2528 - RNA, 23 nt, Artificial Sequence
  synthetic polynucleotide
  misc_feature (1)..(23): combination of 2'-fluoro, 2'-O-methyl, phosphorothioate linked ribonucleotides
ugauaggcaguaguagguccuuu

SEQ ID NO: 2529 - RNA, 23 nt, Artificial Sequence
  synthetic polynucleotide
  misc_feature (1)..(23): combination of 2'-fluoro, 2'-O-methyl, phosphorothioate linked ribonucleotides
uugauaggcaguaguagguccuu

SEQ ID NO: 2530 - RNA, 23 nt, Artificial Sequence
  synthetic polynucleotide
  misc_feature (1)..(23): combination of 2'-fluoro, 2'-O-methyl, phosphorothioate linked ribonucleotides
uuuugauaggcaguaguagguuu

SEQ ID NO: 2531 - RNA, 23 nt, Artificial Sequence
  synthetic polynucleotide
  misc_feature (1)..(23): combination of 2'-fluoro, 2'-O-methyl, phosphorothioate linked ribonucleotides
acguuuugauaggcaguaguauu

SEQ ID NO: 2532 - RNA, 23 nt, Artificial Sequence
  synthetic polynucleotide
  misc_feature (1)..(23): combination of 2'-fluoro, 2'-O-methyl, phosphorothioate linked ribonucleotides
aggcguuuugauaggcaguaguu

SEQ ID NO: 2533 - RNA, 23 nt, Artificial Sequence
  synthetic polynucleotide
  misc_feature (1)..(23): combination of 2'-fluoro, 2'-O-methyl, phosphorothioate linked ribonucleotides
auggugggcguuuugauaggcuu

SEQ ID NO: 2534 - RNA, 23 nt, Artificial Sequence
  synthetic polynucleotide
  misc_feature (1)..(23): combination of 2'-fluoro, 2'-O-methyl, phosphorothioate linked ribonucleotides
auugugcacugcauuugugguuu

SEQ ID NO: 2535 - RNA, 23 nt, Artificial Sequence
  synthetic polynucleotide
  misc_feature (1)..(23): combination of 2'-fluoro, 2'-O-methyl, phosphorothioate linked ribonucleotides
aacuugugcacugcauuuguguu

SEQ ID NO: 2536 - RNA, 23 nt, Artificial Sequence
  synthetic polynucleotide
  misc_feature (1)..(23): combination of 2'-fluoro, 2'-O-methyl, phosphorothioate linked ribonucleotides
ugcacuugugcacugcauuuguu

SEQ ID NO: 2537 - RNA, 23 nt, Artificial Sequence
  synthetic polynucleotide
  misc_feature (1)..(23): combination of 2'-fluoro, 2'-O-methyl, phosphorothioate linked ribonucleotides
aucugcacuugugcacugcauuu

SEQ ID NO: 2538 - RNA, 23 nt, Artificial Sequence
  synthetic polynucleotide
  misc_feature (1)..(23): combination of 2'-fluoro, 2'-O-methyl, phosphorothioate linked ribonucleotides
ugcacucugcacuugugcacuuu

SEQ ID NO: 2539 - RNA, 23 nt, Artificial Sequence
  synthetic polynucleotide
  misc_feature (1)..(23): combination of 2'-fluoro, 2'-O-methyl, phosphorothioate linked ribonucleotides
agccgugcacucugcacuuguuu

SEQ ID NO: 2540 - RNA, 23 nt, Artificial Sequence
  synthetic polynucleotide
  misc_feature (1)..(23): combination of 2'-fluoro, 2'-O-methyl, phosphorothioate linked ribonucleotides
aggccgugcacucugcacuuguu

SEQ ID NO: 2541 - RNA, 23 nt, Artificial Sequence
  synthetic polynucleotide
  misc_feature (1)..(23): combination of 2'-fluoro, 2'-O-methyl, phosphorothioate linked ribonucleotides
auccaggccgugcacucugcauu

SEQ ID NO: 2542 - RNA, 23 nt, Artificial Sequence
  synthetic polynucleotide
  misc_feature (1)..(23): combination of 2'-fluoro, 2'-O-methyl, phosphorothioate linked ribonucleotides
uaucuccaggccgugcacucuuu

SEQ ID NO: 2543 - RNA, 23 nt, Artificial Sequence
  synthetic polynucleotide
  misc_feature (1)..(23): combination of 2'-fluoro, 2'-O-methyl, phosphorothioate linked ribonucleotides
auaucuccaggccgugcacucuu

SEQ ID NO: 2544 - RNA, 23 nt, Artificial Sequence
  synthetic polynucleotide
  misc_feature (1)..(23): combination of 2'-fluoro, 2'-O-methyl, phosphorothioate linked ribonucleotides
agucccugcccucuaucuccauu

SEQ ID NO: 2545 - RNA, 23 nt, Artificial Sequence
  synthetic polynucleotide
  misc_feature (1)..(23): combination of 2'-fluoro, 2'-O-methyl, phosphorothioate linked ribonucleotides
aguagggcugugacuucaggauu

SEQ ID NO: 2546 - RNA, 23 nt, Artificial Sequence
  synthetic polynucleotide
  misc_feature (1)..(23): combination of 2'-fluoro, 2'-O-methyl, phosphorothioate linked ribonucleotides
acgguagggcugugacuucaguu

SEQ ID NO: 2547 - RNA, 23 nt, Artificial Sequence
  synthetic polynucleotide
  misc_feature (1)..(23): combination of 2'-fluoro, 2'-O-methyl, phosphorothioate linked ribonucleotides
aggcgguagggcugugacuucuu

SEQ ID NO: 2548 - RNA, 23 nt, Artificial Sequence
  synthetic polynucleotide
  misc_feature (1)..(23): combination of 2'-fluoro, 2'-O-methyl, phosphorothioate linked ribonucleotides
acgucucggucgcaugugagguu

SEQ ID NO: 2549 - RNA, 23 nt, Artificial Sequence
  synthetic polynucleotide
  misc_feature (1)..(23): combination of 2'-fluoro, 2'-O-methyl, phosphorothioate linked ribonucleotides
aacgucucggucgcaugugaguu

SEQ ID NO: 2550 - RNA, 23 nt, Artificial Sequence
  synthetic polynucleotide
  misc_feature (1)..(23): combination of 2'-fluoro, 2'-O-methyl, phosphorothioate linked ribonucleotides
agacgucucggucgcaugugauu

SEQ ID NO: 2551 - RNA, 23 nt, Artificial Sequence
  synthetic polynucleotide
  misc_feature (1)..(23): combination of 2'-fluoro, 2'-O-methyl, phosphorothioate linked ribonucleotides
aggacgucucggucgcauguguu

SEQ ID NO: 2552 - RNA, 23 nt, Artificial Sequence
  synthetic polynucleotide
  misc_feature (1)..(23): combination of 2'-fluoro, 2'-O-methyl, phosphorothioate linked ribonucleotides
aaggacgucucggucgcauguuu

SEQ ID NO: 2553 - RNA, 23 nt, Artificial Sequence
  synthetic polynucleotide
  misc_feature (1)..(23): combination of 2'-fluoro, 2'-O-methyl, phosphorothioate linked ribonucleotides
aaugaggacgucucggucgcauu

SEQ ID NO: 2554 - RNA, 23 nt, Artificial Sequence
  synthetic polynucleotide
  misc_feature (1)..(23): combination of 2'-fluoro, 2'-O-methyl, phosphorothioate linked ribonucleotides
ugaugaggacgucucggucgcuu

SEQ ID NO: 2555 - RNA, 23 nt, Artificial Sequence
  synthetic polynucleotide
  misc_feature (1)..(23): combination of 2'-fluoro, 2'-O-methyl, phosphorothioate linked ribonucleotides
uauuugaugaggacgucucgguu

SEQ ID NO: 2556 - RNA, 23 nt, Artificial Sequence
  synthetic polynucleotide
  misc_feature (1)..(23): combination of 2'-fluoro, 2'-O-methyl, phosphorothioate linked ribonucleotides
auauuugaugaggacgucucguu

SEQ ID NO: 2557 - RNA, 23 nt, Artificial Sequence
  synthetic polynucleotide
  misc_feature (1)..(23): combination of 2'-fluoro, 2'-O-methyl, phosphorothioate linked ribonucleotides
ugcuauuugaugaggacgucuuu

SEQ ID NO: 2558 - RNA, 23 nt, Artificial Sequence
  synthetic polynucleotide
  misc_feature (1)..(23): combination of 2'-fluoro, 2'-O-methyl, phosphorothioate linked ribonucleotides
aagucugcuauuugaugaggauu

SEQ ID NO: 2559 - RNA, 23 nt, Artificial Sequence
  synthetic polynucleotide
  misc_feature (1)..(23): combination of 2'-fluoro, 2'-O-methyl, phosphorothioate linked ribonucleotides
acaagucugcuauuugaugaguu

SEQ ID NO: 2560 - RNA, 23 nt, Artificial Sequence
  synthetic polynucleotide
  misc_feature (1)..(23): combination of 2'-fluoro, 2'-O-methyl, phosphorothioate linked ribonucleotides
ucaagaaugggcuggugucuguu

SEQ ID NO: 2561 - RNA, 23 nt, Artificial Sequence
  synthetic polynucleotide
  misc_feature (1)..(23): combination of 2'-fluoro, 2'-O-methyl, phosphorothioate linked ribonucleotides
aucaagaaugggcuggugucuuu

SEQ ID NO: 2562 - RNA, 23 nt, Artificial Sequence
  synthetic polynucleotide
  misc_feature (1)..(23): combination of 2'-fluoro, 2'-O-methyl, phosphorothioate linked ribonucleotides
aaucaagaaugggcuggugucuu

SEQ ID NO: 2563 - RNA, 23 nt, Artificial Sequence
  synthetic polynucleotide
  misc_feature (1)..(23): combination of 2'-fluoro, 2'-O-methyl, phosphorothioate linked ribonucleotides
aaaaggaucaagaaugggcuguu

SEQ ID NO: 2564 - RNA, 23 nt, Artificial Sequence
  synthetic polynucleotide
  misc_feature (1)..(23): combination of 2'-fluoro, 2'-O-methyl, phosphorothioate linked ribonucleotides
aucagaaaggaucaagaaugguu

SEQ ID NO: 2565 - RNA, 23 nt, Artificial Sequence
  synthetic polynucleotide
  misc_feature (1)..(23): combination of 2'-fluoro, 2'-O-methyl, phosphorothioate linked ribonucleotides
aucaucccaagaauccucugcuu

SEQ ID NO: 2566 - RNA, 23 nt, Artificial Sequence
  synthetic polynucleotide
  misc_feature (1)..(23): combination of 2'-fluoro, 2'-O-methyl, phosphorothioate linked ribonucleotides
uaagaagcucaucccaagaauuu

SEQ ID NO: 2567 - RNA, 23 nt, Artificial Sequence
  synthetic polynucleotide
  misc_feature (1)..(23): combination of 2'-fluoro, 2'-O-methyl, phosphorothioate linked ribonucleotides
aaauaagaagcucaucccaaguu

SEQ ID NO: 2568 - RNA, 23 nt, Artificial Sequence
  synthetic polynucleotide
  misc_feature (1)..(23): combination of 2'-fluoro, 2'-O-methyl, phosphorothioate linked ribonucleotides
aaccaauaagaagcucaucccuu

SEQ ID NO: 2569 - RNA, 23 nt, Artificial Sequence
  synthetic polynucleotide
  misc_feature (1)..(23): combination of 2'-fluoro, 2'-O-methyl, phosphorothioate linked ribonucleotides
ucaccaauaagaagcucauccuu

SEQ ID NO: 2570 - RNA, 23 nt, Artificial Sequence
  synthetic polynucleotide
  misc_feature (1)..(23): combination of 2'-fluoro, 2'-O-methyl, phosphorothioate linked ribonucleotides
aaucacccuuuucaguuccacuu

SEQ ID NO: 2571 - RNA, 23 nt, Artificial Sequence
  synthetic polynucleotide
  misc_feature (1)..(23): combination of 2'-fluoro, 2'-O-methyl, phosphorothioate linked ribonucleotides
acaucacccuuuucaguuccauu

SEQ ID NO: 2572 - RNA, 23 nt, Artificial Sequence
  synthetic polynucleotid
  misc_feature (1)..(23): combination of 2'-fluoro, 2'-O-methyl, phosphorothioate linked ribonucleotides
agccaucacccuuuucaguucuu

SEQ ID NO: 2573 - RNA, 23 nt, Artificial Sequence
  synthetic polynucleotide
  misc_feature (1)..(23): combination of 2'-fluoro, 2'-O-methyl, phosphorothioate linked ribonucleotides
acaagccaucacccuuuucaguu

SEQ ID NO: 2574 - RNA, 23 nt, Artificial Sequence
  synthetic polynucleotide
  misc_feature (1)..(23): combination of 2'-fluoro, 2'-O-methyl, phosphorothioate linked ribonucleotides
aacaagccaucacccuuuucauu

SEQ ID NO: 2575 - RNA, 23 nt, Artificial Sequence
  synthetic polynucleotide
  misc_feature (1)..(23): combination of 2'-fluoro, 2'-O-methyl, phosphorothioate linked ribonucleotides
aaacaagccaucacccuuuucuu

SEQ ID NO: 2576 - RNA, 23 nt, Artificial Sequence
  synthetic polynucleotide
  misc_feature (1)..(23): combination of 2'-fluoro, 2'-O-methyl, phosphorothioate linked ribonucleotides
agaacaagccaucacccuuuuuu

SEQ ID NO: 2577 - RNA, 23 nt, Artificial Sequence
  synthetic polynucleotide
  misc_feature (1)..(23): combination of 2'-fluoro, 2'-O-methyl, phosphorothioate linked ribonucleotides
aacaccggugucuggguccacuu

SEQ ID NO: 2578 - RNA, 23 nt, Artificial Sequence
  synthetic polynucleotide
  misc_feature (1)..(23): combination of 2'-fluoro, 2'-O-methyl, phosphorothioate linked ribonucleotides
ugacaccggugucuggguccauu

SEQ ID NO: 2579 - RNA, 23 nt, Artificial Sequence
  synthetic polynucleotide
  misc_feature (1)..(23): combination of 2'-fluoro, 2'-O-methyl, phosphorothioate linked ribonucleotides
augacaccggugucuggguccuu

SEQ ID NO: 2580 - RNA, 23 nt, Artificial Sequence
  synthetic polynucleotide
  misc_feature (1)..(23): combination of 2'-fluoro, 2'-O-methyl, phosphorothioate linked ribonucleotides
ucaugacaccggugucuggguuu

SEQ ID NO: 2581 - RNA, 23 nt, Artificial Sequence
  synthetic polynucleotide
  misc_feature (1)..(23): combination of 2'-fluoro, 2'-O-methyl, phosphorothioate linked ribonucleotides
acucaugacaccggugucugguu

SEQ ID NO: 2582 - RNA, 23 nt, Artificial Sequence
  synthetic polynucleotide
  misc_feature (1)..(23): combination of 2'-fluoro, 2'-O-methyl, phosphorothioate linked ribonucleotides
uuccugcucaugacaccgguguu

SEQ ID NO: 2583 - RNA, 23 nt, Artificial Sequence
  synthetic polynucleotide
  misc_feature (1)..(23): combination of 2'-fluoro, 2'-O-methyl, phosphorothioate linked ribonucleotides
agguuccuuccugcucaugacuu

SEQ ID NO: 2584 - RNA, 23 nt, Artificial Sequence
  synthetic polynucleotide
  misc_feature (1)..(23): combination of 2'-fluoro, 2'-O-methyl, phosphorothioate linked ribonucleotides
aagcgguuccuuccugcucauuu

SEQ ID NO: 2585 - RNA, 23 nt, Artificial Sequence
  synthetic polynucleotide
  misc_feature (1)..(23): combination of 2'-fluoro, 2'-O-methyl, phosphorothioate linked ribonucleotides
uguuuccagcgguuccuuccuuu

SEQ ID NO: 2586 - RNA, 23 nt, Artificial Sequence
  synthetic polynucleotide
  misc_feature (1)..(23): combination of 2'-fluoro, 2'-O-methyl, phosphorothioate linked ribonucleotides
auguuuccagcgguuccuuccuu

SEQ ID NO: 2587 - RNA, 23 nt, Artificial Sequence
  synthetic polynucleotide
  misc_feature (1)..(23): combination of 2'-fluoro, 2'-O-methyl, phosphorothioate linked ribonucleotides
aguguuuccagcgguuccuucuu

SEQ ID NO: 2588 - RNA, 23 nt, Artificial Sequence
  synthetic polynucleotide
  misc_feature (1)..(23): combination of 2'-fluoro, 2'-O-methyl, phosphorothioate linked ribonucleotides
agguucccauuacuggcccaguu

SEQ ID NO: 2589 - RNA, 23 nt, Artificial Sequence
  synthetic polynucleotide
  misc_feature (1)..(23): combination of 2'-fluoro, 2'-O-methyl, phosphorothioate linked ribonucleotides
uacgguucccauuacuggcccuu

SEQ ID NO: 2590 - RNA, 23 nt, Artificial Sequence
  synthetic polynucleotide
  misc_feature (1)..(23): combination of 2'-fluoro, 2'-O-methyl, phosphorothioate linked ribonucleotides
auacgguucccauuacuggccuu

SEQ ID NO: 2591 - RNA, 23 nt, Artificial Sequence
  synthetic polynucleotide
  misc_feature (1)..(23): combination of 2'-fluoro, 2'-O-methyl, phosphorothioate linked ribonucleotides
aauacgguucccauuacuggcuu

SEQ ID NO: 2592 - RNA, 23 nt, Artificial Sequence
  synthetic polynucleotide
  misc_feature (1)..(23): combination of 2'-fluoro, 2'-O-methyl, phosphorothioate linked ribonucleotides
acauacgguucccauuacugguu

SEQ ID NO: 2593 - RNA, 23 nt, Artificial Sequence
  synthetic polynucleotide
  misc_feature (1)..(23): combination of 2'-fluoro, 2'-O-methyl, phosphorothioate linked ribonucleotides
aacauacgguucccauuacuguu

SEQ ID NO: 2594 - RNA, 23 nt, Artificial Sequence
  synthetic polynucleotide
  misc_feature (1)..(23): combination of 2'-fluoro, 2'-O-methyl, phosphorothioate linked ribonucleotides
agacauacgguucccauuacuuu

SEQ ID NO: 2595 - RNA, 23 nt, Artificial Sequence
  synthetic polynucleotide
  misc_feature (1)..(23): combination of 2'-fluoro, 2'-O-methyl, phosphorothioate linked ribonucleotides
uuccaggacauacgguucccauu

SEQ ID NO: 2596 - RNA, 23 nt, Artificial Sequence
  synthetic polynucleotide
  misc_feature (1)..(23): combination of 2'-fluoro, 2'-O-methyl, phosphorothioate linked ribonucleotides
uauuccaggacauacgguuccuu

SEQ ID NO: 2597 - RNA, 23 nt, Artificial Sequence
  synthetic polynucleotide
  misc_feature (1)..(23): combination of 2'-fluoro, 2'-O-methyl, phosphorothioate linked ribonucleotides
uuuaaaaggcaucuaauauucuu

SEQ ID NO: 2598 - RNA, 23 nt, Artificial Sequence
  synthetic polynucleotide
  misc_feature (1)..(23): combination of 2'-fluoro, 2'-O-methyl, phosphorothioate linked ribonucleotides
agaacauuuuuaaaaggcaucuu

SEQ ID NO: 2599 - RNA, 23 nt, Artificial Sequence
  synthetic polynucleotide
  misc_feature (1)..(23): combination of 2'-fluoro, 2'-O-methyl, phosphorothioate linked ribonucleotides
uagaggucucaguucugaaacuu

SEQ ID NO: 2600 - RNA, 23 nt, Artificial Sequence
  synthetic polynucleotide
  misc_feature (1)..(23): combination of 2'-fluoro, 2'-O-methyl, phosphorothioate linked ribonucleotides
auguagaggucucaguucugauu

SEQ ID NO: 2601 - RNA, 23 nt, Artificial Sequence
  synthetic polynucleotide
  misc_feature (1)..(23): combination of 2'-fluoro, 2'-O-methyl, phosphorothioate linked ribonucleotides
agaaaauguagaggucucaguuu

SEQ ID NO: 2602 - RNA, 23 nt, Artificial Sequence
  synthetic polynucleotide
  misc_feature (1)..(23): combination of 2'-fluoro, 2'-O-methyl, phosphorothioate linked ribonucleotides
aagaaaauguagaggucucaguu

SEQ ID NO: 2603 - RNA, 23 nt, Artificial Sequence
  synthetic polynucleotide
  misc_feature (1)..(23): combination of 2'-fluoro, 2'-O-methyl, phosphorothioate linked ribonucleotides
aaagaaaauguagaggucucauu

SEQ ID NO: 2604 - RNA, 23 nt, Artificial Sequence
  synthetic polynucleotide
  misc_feature (1)..(23): combination of 2'-fluoro, 2'-O-methyl, phosphorothioate linked ribonucleotides
agacgaaaaaugugaaaaucauu

SEQ ID NO: 2605 - RNA, 23 nt, Artificial Sequence
  synthetic polynucleotide
  misc_feature (1)..(23): combination of 2'-fluoro, 2'-O-methyl, phosphorothioate linked ribonucleotides
aagacgaaaaaugugaaaaucuu

SEQ ID NO: 2606 - RNA, 23 nt, Artificial Sequence
  synthetic polynucleotide
  misc_feature (1)..(23): combination of 2'-fluoro, 2'-O-methyl, phosphorothioate linked ribonucleotides
aaagacgaaaaaugugaaaauuu

SEQ ID NO: 2607 - RNA, 23 nt, Artificial Sequence
  synthetic polynucleotide
  misc_feature (1)..(23): combination of 2'-fluoro, 2'-O-methyl, phosphorothioate linked ribonucleotides
aaaaagacgaaaaaugugaaauu

SEQ ID NO: 2608 - RNA, 23 nt, Artificial Sequence
  synthetic polynucleotide
  misc_feature (1)..(23): combination of 2'-fluoro, 2'-O-methyl, phosphorothioate linked ribonucleotides
acaaaagacgaaaaaugugaauu

SEQ ID NO: 2609 - RNA, 23 nt, Artificial Sequence
  synthetic polynucleotide
  misc_feature (1)..(23): combination of 2'-fluoro, 2'-O-methyl, phosphorothioate linked ribonucleotides
uccaaaagacgaaaaaugugauu

SEQ ID NO: 2610 - RNA, 23 nt, Artificial Sequence
  synthetic polynucleotide
  misc_feature (1)..(23): combination of 2'-fluoro, 2'-O-methyl, phosphorothioate linked ribonucleotides
aguccaaaagacgaaaaauguuu

SEQ ID NO: 2611 - RNA, 23 nt, Artificial Sequence
  synthetic polynucleotide
  misc_feature (1)..(23): combination of 2'-fluoro, 2'-O-methyl, phosphorothioate linked ribonucleotides
aagaaguccaaaagacgaaaauu

SEQ ID NO: 2612 - RNA, 23 nt, Artificial Sequence
  synthetic polynucleotide
  misc_feature (1)..(23): combination of 2'-fluoro, 2'-O-methyl, phosphorothioate linked ribonucleotides
acagaaguccaaaagacgaaauu

SEQ ID NO: 2613 - RNA, 23 nt, Artificial Sequence
  synthetic polynucleotide
  misc_feature (1)..(23): combination of 2'-fluoro, 2'-O-methyl, phosphorothioate linked ribonucleotides
accagaaguccaaaagacgaauu

SEQ ID NO: 2614 - RNA, 23 nt, Artificial Sequence
  synthetic polynucleotide
  misc_feature (1)..(23): combination of 2'-fluoro, 2'-O-methyl, phosphorothioate linked ribonucleotides
aaccagaaguccaaaagacgauu

SEQ ID NO: 2615 - RNA, 23 nt, Artificial Sequence
  synthetic polynucleotide
  misc_feature (1)..(23): combination of 2'-fluoro, 2'-O-methyl, phosphorothioate linked ribonucleotides
aagacaccagaaguccaaaaguu

SEQ ID NO: 2616 - RNA, 23 nt, Artificial Sequence
  synthetic polynucleotide
  misc_feature (1)..(23): combination of 2'-fluoro, 2'-O-methyl, phosphorothioate linked ribonucleotides
auugagacaccagaaguccaauu

SEQ ID NO: 2617 - RNA, 23 nt, Artificial Sequence
  synthetic polynucleotide
  misc_feature (1)..(23): combination of 2'-fluoro, 2'-O-methyl, phosphorothioate linked ribonucleotides
acauugagacaccagaaguccuu

SEQ ID NO: 2618 - RNA, 23 nt, Artificial Sequence
  synthetic polynucleotide
  misc_feature (1)..(23): combination of 2'-fluoro, 2'-O-methyl, phosphorothioate linked ribonucleotides
agcauugagacaccagaagucuu

SEQ ID NO: 2619 - RNA, 23 nt, Artificial Sequence
  synthetic polynucleotide
  misc_feature (1)..(23): combination of 2'-fluoro, 2'-O-methyl, phosphorothioate linked ribonucleotides
ugaagcauugagacaccagaauu

SEQ ID NO: 2620 - RNA, 23 nt, Artificial Sequence
  synthetic polynucleotide
  misc_feature (1)..(23): combination of 2'-fluoro, 2'-O-methyl, phosphorothioate linked ribonucleotides
uuugcacugggacauugaagcuu

SEQ ID NO: 2621 - RNA, 23 nt, Artificial Sequence
  synthetic polynucleotide
  misc_feature (1)..(23): combination of 2'-fluoro, 2'-O-methyl, phosphorothioate linked ribonucleotides
uuacuuuuugcacugggacauuu

SEQ ID NO: 2622 - RNA, 23 nt, Artificial Sequence
  synthetic polynucleotide
  misc_feature (1)..(23): combination of 2'-fluoro, 2'-O-methyl, phosphorothioate linked ribonucleotides
uuuacuuuuugcacugggacauu

SEQ ID NO: 2623 - RNA, 23 nt, Artificial Sequence
  synthetic polynucleotide
  misc_feature (1)..(23): combination of 2'-fluoro, 2'-O-methyl, phosphorothioate linked ribonucleotides
auuuacuuuuugcacugggacuu

SEQ ID NO: 2624 - RNA, 23 nt, Artificial Sequence
  synthetic polynucleotide
  misc_feature (1)..(23): combination of 2'-fluoro, 2'-O-methyl, phosphorothioate linked ribonucleotides
ucuuuacuuuuugcacugggauu

SEQ ID NO: 2625 - RNA, 23 nt, Artificial Sequence
  synthetic polynucleotide
  misc_feature (1)..(23): combination of 2'-fluoro, 2'-O-methyl, phosphorothioate linked ribonucleotides
uauuucuuuacuuuuugcacuuu

SEQ ID NO: 2626 - RNA, 23 nt, Artificial Sequence
  synthetic polynucleotide
  misc_feature (1)..(23): combination of 2'-fluoro, 2'-O-methyl, phosphorothioate linked ribonucleotides
auuauugagacuauauuucuuuu

SEQ ID NO: 2627 - RNA, 23 nt, Artificial Sequence
  synthetic polynucleotide
  misc_feature (1)..(23): combination of 2'-fluoro, 2'-O-methyl, phosphorothioate linked ribonucleotides
uaaguuauugagacuauauuuuu

SEQ ID NO: 2628 - RNA, 23 nt, Artificial Sequence
  synthetic polynucleotide
  misc_feature (1)..(23): combination of 2'-fluoro, 2'-O-methyl, phosphorothioate linked ribonucleotides
acuaaguuauugagacuauauuu

SEQ ID NO: 2629 - RNA, 23 nt, Artificial Sequence
  synthetic polynucleotide
  misc_feature (1)..(23): combination of 2'-fluoro, 2'-O-methyl, phosphorothioate linked ribonucleotides
uacuaaguuauugagacuauauu

SEQ ID NO: 2630 - RNA, 23 nt, Artificial Sequence
  synthetic polynucleotide
  misc_feature (1)..(23): combination of 2'-fluoro, 2'-O-methyl, phosphorothioate linked ribonucleotides
auacuaaguuauugagacuauuu

SEQ ID NO: 2631 - RNA, 23 nt, Artificial Sequence
  synthetic polynucleotide
  misc_feature (1)..(23): combination of 2'-fluoro, 2'-O-methyl, phosphorothioate linked ribonucleotides
acuacuaaguuauugagacuauu

SEQ ID NO: 2632 - RNA, 23 nt, Artificial Sequence
  synthetic polynucleotide
  misc_feature (1)..(23): combination of 2'-fluoro, 2'-O-methyl, phosphorothioate linked ribonucleotides
uccuacuaaguuauugagacuuu

SEQ ID NO: 2633 - RNA, 23 nt, Artificial Sequence
  synthetic polynucleotide
  misc_feature (1)..(23): combination of 2'-fluoro, 2'-O-methyl, phosphorothioate linked ribonucleotides
aaaguccuacuaaguuauugauu

SEQ ID NO: 2634 - RNA, 23 nt, Artificial Sequence
  synthetic polynucleotide
  misc_feature (1)..(23): combination of 2'-fluoro, 2'-O-methyl, phosphorothioate linked ribonucleotides
ugaaguccuacuaaguuauuguu

SEQ ID NO: 2635 - RNA, 23 nt, Artificial Sequence
  synthetic polynucleotide
  misc_feature (1)..(23): combination of 2'-fluoro, 2'-O-methyl, phosphorothioate linked ribonucleotides
acugaaguccuacuaaguuauuu

SEQ ID NO: 2636 - RNA, 23 nt, Artificial Sequence
  synthetic polynucleotide
  misc_feature (1)..(23): combination of 2'-fluoro, 2'-O-methyl, phosphorothioate linked ribonucleotides
uuacugaaguccuacuaaguuuu

SEQ ID NO: 2637 - RNA, 23 nt, Artificial Sequence
  synthetic polynucleotide
  misc_feature (1)..(23): combination of 2'-fluoro, 2'-O-methyl, phosphorothioate linked ribonucleotides
auuacugaaguccuacuaaguuu

SEQ ID NO: 2638 - RNA, 23 nt, Artificial Sequence
  synthetic polynucleotide
  misc_feature (1)..(23): combination of 2'-fluoro, 2'-O-methyl, phosphorothioate linked ribonucleotides
aacuuacugaaguccuacuaauu

SEQ ID NO: 2639 - RNA, 23 nt, Artificial Sequence
  synthetic polynucleotide
  misc_feature (1)..(23): combination of 2'-fluoro, 2'-O-methyl, phosphorothioate linked ribonucleotides
ugacuuacugaaguccuacuauu

SEQ ID NO: 2640 - RNA, 23 nt, Artificial Sequence
  synthetic polynucleotide
  misc_feature (1)..(23): combination of 2'-fluoro, 2'-O-methyl, phosphorothioate linked ribonucleotides
augacuuacugaaguccuacuuu

SEQ ID NO: 2641 - RNA, 23 nt, Artificial Sequence
  synthetic polynucleotide
  misc_feature (1)..(23): combination of 2'-fluoro, 2'-O-methyl, phosphorothioate linked ribonucleotides
aagugacuuacugaaguccuauu

SEQ ID NO: 2642 - RNA, 23 nt, Artificial Sequence
  synthetic polynucleotide
  misc_feature (1)..(23): combination of 2'-fluoro, 2'-O-methyl, phosphorothioate linked ribonucleotides
agaauccugucuugucauuuauu

SEQ ID NO: 2643 - RNA, 23 nt, Artificial Sequence
  synthetic polynucleotide
  misc_feature (1)..(23): combination of 2'-fluoro, 2'-O-methyl, phosphorothioate linked ribonucleotides
aacggggaguuuucagaauccuu

SEQ ID NO: 2644 - RNA, 23 nt, Artificial Sequence
  synthetic polynucleotide
  misc_feature (1)..(23): combination of 2'-fluoro, 2'-O-methyl, phosphorothioate linked ribonucleotides
aaacggggaguuuucagaaucuu

SEQ ID NO: 2645 - RNA, 23 nt, Artificial Sequence
  synthetic polynucleotide
  misc_feature (1)..(23): combination of 2'-fluoro, 2'-O-methyl, phosphorothioate linked ribonucleotides
uuaaacggggaguuuucagaauu

SEQ ID NO: 2646 - RNA, 23 nt, Artificial Sequence
  synthetic polynucleotide
  misc_feature (1)..(23): combination of 2'-fluoro, 2'-O-methyl, phosphorothioate linked ribonucleotides
auuaaacggggaguuuucagauu

SEQ ID NO: 2647 - RNA, 23 nt, Artificial Sequence
  synthetic polynucleotide
  misc_feature (1)..(23): combination of 2'-fluoro, 2'-O-methyl, phosphorothioate linked ribonucleotides
aguuaaacggggaguuuucaguu

SEQ ID NO: 2648 - RNA, 23 nt, Artificial Sequence
  synthetic polynucleotide
  misc_feature (1)..(23): combination of 2'-fluoro, 2'-O-methyl, phosphorothioate linked ribonucleotides
aaguuaaacggggaguuuucauu

SEQ ID NO: 2649 - RNA, 23 nt, Artificial Sequence
  synthetic polynucleotide
  misc_feature (1)..(23): combination of 2'-fluoro, 2'-O-methyl, phosphorothioate linked ribonucleotides
aucaguuaaacggggaguuuuuu

SEQ ID NO: 2650 - RNA, 23 nt, Artificial Sequence
  synthetic polynucleotide
  misc_feature (1)..(23): combination of 2'-fluoro, 2'-O-methyl, phosphorothioate linked ribonucleotides
auaaucaguuaaacggggaguuu

SEQ ID NO: 2651 - RNA, 23 nt, Artificial Sequence
  synthetic polynucleotide
  misc_feature (1)..(23): combination of 2'-fluoro, 2'-O-methyl, phosphorothioate linked ribonucleotides
aauaaucaguuaaacggggaguu

SEQ ID NO: 2652 - RNA, 23 nt, Artificial Sequence
  synthetic polynucleotide
  misc_feature (1)..(23): combination of 2'-fluoro, 2'-O-methyl, phosphorothioate linked ribonucleotides
acauaaucaguuaaacggggauu

SEQ ID NO: 2653 - RNA, 23 nt, Artificial Sequence
  synthetic polynucleotide
  misc_feature (1)..(23): combination of 2'-fluoro, 2'-O-methyl, phosphorothioate linked ribonucleotides
uccauaaucaguuaaacgggguu

SEQ ID NO: 2654 - RNA, 23 nt, Artificial Sequence
  synthetic polynucleotide
  misc_feature (1)..(23): combination of 2'-fluoro, 2'-O-methyl, phosphorothioate linked ribonucleotides
auaaacggagaagcaggagaauu

SEQ ID NO: 2655 - RNA, 23 nt, Artificial Sequence
  synthetic polynucleotide
  misc_feature (1)..(23): combination of 2'-fluoro, 2'-O-methyl, phosphorothioate linked ribonucleotides
aauaaacggagaagcaggagauu

SEQ ID NO: 2656 - RNA, 23 nt, Artificial Sequence
  synthetic polynucleotide
  misc_feature (1)..(23): combination of 2'-fluoro, 2'-O-methyl, phosphorothioate linked ribonucleotides
agauaaacggagaagcaggaguu

SEQ ID NO: 2657 - RNA, 23 nt, Artificial Sequence
  synthetic polynucleotide
  misc_feature (1)..(23): combination of 2'-fluoro, 2'-O-methyl, phosphorothioate linked ribonucleotides
auagauaaacggagaagcagguu

SEQ ID NO: 2658 - RNA, 23 nt, Artificial Sequence
  synthetic polynucleotide
  misc_feature (1)..(23): combination of 2'-fluoro, 2'-O-methyl, phosphorothioate linked ribonucleotides
uugguagauaaacggagaagcuu

SEQ ID NO: 2659 - RNA, 23 nt, Artificial Sequence
  synthetic polynucleotide
  misc_feature (1)..(23): combination of 2'-fluoro, 2'-O-methyl, phosphorothioate linked ribonucleotides
auugguagauaaacggagaaguu

SEQ ID NO: 2660 - RNA, 23 nt, Artificial Sequence
  synthetic polynucleotide
  misc_feature (1)..(23): combination of 2'-fluoro, 2'-O-methyl, phosphorothioate linked ribonucleotides
ucuugguagauaaacggagaauu

SEQ ID NO: 2661 - RNA, 23 nt, Artificial Sequence
  synthetic polynucleotide
  misc_feature (1)..(23): combination of 2'-fluoro, 2'-O-methyl, phosphorothioate linked ribonucleotides
aucuugguagauaaacggagauu

SEQ ID NO: 2662 - RNA, 23 nt, Artificial Sequence
  synthetic polynucleotide
  misc_feature (1)..(23): combination of 2'-fluoro, 2'-O-methyl, phosphorothioate linked ribonucleotides
acucuugguagauaaacggaguu

SEQ ID NO: 2663 - RNA, 23 nt, Artificial Sequence
  synthetic polynucleotide
  misc_feature (1)..(23): combination of 2'-fluoro, 2'-O-methyl, phosphorothioate linked ribonucleotides
agcucuugguagauaaacggauu

SEQ ID NO: 2664 - RNA, 23 nt, Artificial Sequence
  synthetic polynucleotide
  misc_feature (1)..(23): combination of 2'-fluoro, 2'-O-methyl, phosphorothioate linked ribonucleotides
ugcgcucuugguagauaaacguu

SEQ ID NO: 2665 - RNA, 23 nt, Artificial Sequence
  synthetic polynucleotide
  misc_feature (1)..(23): combination of 2'-fluoro, 2'-O-methyl, phosphorothioate linked ribonucleotides
aucugcgcucuugguagauaauu

SEQ ID NO: 2666 - RNA, 23 nt, Artificial Sequence
  synthetic polynucleotide
  misc_feature (1)..(23): combination of 2'-fluoro, 2'-O-methyl, phosphorothioate linked ribonucleotides
aagucugcgcucuugguagauuu

SEQ ID NO: 2667 - RNA, 23 nt, Artificial Sequence
  synthetic polynucleotide
  misc_feature (1)..(23): combination of 2'-fluoro, 2'-O-methyl, phosphorothioate linked ribonucleotides
ugcaagucugcgcucuugguauu

SEQ ID NO: 2668 - RNA, 23 nt, Artificial Sequence
  synthetic polynucleotide
  misc_feature (1)..(23): combination of 2'-fluoro, 2'-O-methyl, phosphorothioate linked ribonucleotides
augcaagucugcgcucuugguuu

SEQ ID NO: 2669 - RNA, 23 nt, Artificial Sequence
  synthetic polynucleotide
  misc_feature (1)..(23): combination of 2'-fluoro, 2'-O-methyl, phosphorothioate linked ribonucleotides
agaugcaagucugcgcucuuguu

SEQ ID NO: 2670 - RNA, 23 nt, Artificial Sequence
  synthetic polynucleotide
  misc_feature (1)..(23): combination of 2'-fluoro, 2'-O-methyl, phosphorothioate linked ribonucleotides
aggaugcaagucugcgcucuuuu

SEQ ID NO: 2671 - RNA, 23 nt, Artificial Sequence
  synthetic polynucleotide
  misc_feature (1)..(23): combination of 2'-fluoro, 2'-O-methyl, phosphorothioate linked ribonucleotides
acaggaugcaagucugcgcucuu

SEQ ID NO: 2672 - RNA, 23 nt, Artificial Sequence
  synthetic polynucleotide
  misc_feature (1)..(23): combination of 2'-fluoro, 2'-O-methyl, phosphorothioate linked ribonucleotides
ugacaggaugcaagucugcgcuu

SEQ ID NO: 2673 - RNA, 23 nt, Artificial Sequence
  synthetic polynucleotide
  misc_feature (1)..(23): combination of 2'-fluoro, 2'-O-methyl, phosphorothioate linked ribonucleotides
augacaggaugcaagucugcguu

SEQ ID NO: 2674 - RNA, 23 nt, Artificial Sequence
  synthetic polynucleotide
  misc_feature (1)..(23): combination of 2'-fluoro, 2'-O-methyl, phosphorothioate linked ribonucleotides
uagugacaggaugcaagucuguu

SEQ ID NO: 2675 - RNA, 23 nt, Artificial Sequence
  synthetic polynucleotide
  misc_feature (1)..(23): combination of 2'-fluoro, 2'-O-methyl, phosphorothioate linked ribonucleotides
augguagugacaggaugcaaguu

SEQ ID NO: 2676 - RNA, 23 nt, Artificial Sequence
  synthetic polynucleotide
  misc_feature (1)..(23): combination of 2'-fluoro, 2'-O-methyl, phosphorothioate linked ribonucleotides
acgagugguagugacaggauguu

SEQ ID NO: 2677 - RNA, 23 nt, Artificial Sequence
  synthetic polynucleotide
  misc_feature (1)..(23): combination of 2'-fluoro, 2'-O-methyl, phosphorothioate linked ribonucleotides
uaacgagugguagugacaggauu

SEQ ID NO: 2678 - RNA, 23 nt, Artificial Sequence
  synthetic polynucleotide
  misc_feature (1)..(23): combination of 2'-fluoro, 2'-O-methyl, phosphorothioate linked ribonucleotides
auaacgagugguagugacagguu

SEQ ID NO: 2679 - RNA, 23 nt, Artificial Sequence
  synthetic polynucleotide
  misc_feature (1)..(23): combination of 2'-fluoro, 2'-O-methyl, phosphorothioate linked ribonucleotides
ucuaacgagugguagugacaguu

SEQ ID NO: 2680 - RNA, 23 nt, Artificial Sequence
  synthetic polynucleotide
  misc_feature (1)..(23): combination of 2'-fluoro, 2'-O-methyl, phosphorothioate linked ribonucleotides
aucuaacgagugguagugacauu

SEQ ID NO: 2681 - RNA, 23 nt, Artificial Sequence
  synthetic polynucleotide
  misc_feature (1)..(23): combination of 2'-fluoro, 2'-O-methyl, phosphorothioate linked ribonucleotides
auuucucuaacgagugguaguuu

SEQ ID NO: 2682 - RNA, 23 nt, Artificial Sequence
  synthetic polynucleotide
  misc_feature (1)..(2): combination of 2'-fluoro, 2'-O-methyl, phosphorothioate linked ribonucleotides
ucuuccagcccacccacucuuuu

SEQ ID NO: 2683 - RNA, 23 nt, Artificial Sequence
  synthetic polynucleotide
  misc_feature (1)..(23): combination of 2'-fluoro, 2'-O-methyl, phosphorothioate linked ribonucleotides
aggcaauaacacauucuaggauu

SEQ ID NO: 2684 - RNA, 23 nt, Artificial Sequence
  synthetic polynucleotide
  misc_feature (1)..(23): combination of 2'-fluoro, 2'-O-methyl, phosphorothioate linked ribonucleotides
agggcaauaacacauucuagguu

SEQ ID NO: 2685 - RNA, 23 nt, Artificial Sequence
  synthetic polynucleotide
  misc_feature (1)..(23): combination of 2'-fluoro, 2'-O-methyl, phosphorothioate linked ribonucleotides
aaacaggggcaauaacacauuuu

SEQ ID NO: 2686 - RNA, 23 nt, Artificial Sequence
  synthetic polynucleotide
  misc_feature (1)..(23): combination of 2'-fluoro, 2'-O-methyl, phosphorothioate linked ribonucleotides
aaugaacaggggcaauaacacuu

SEQ ID NO: 2687 - RNA, 23 nt, Artificial Sequence
  synthetic polynucleotide
  misc_feature (1)..(23): combination of 2'-fluoro, 2'-O-methyl, phosphorothioate linked ribonucleotides
acucaugaacaggggcaauaauu

SEQ ID NO: 2688 - RNA, 23 nt, Artificial Sequence
  synthetic polynucleotide
  misc_feature (1)..(23): combination of 2'-fluoro, 2'-O-methyl, phosphorothioate linked ribonucleotides
uaccucaugaacaggggcaauuu

SEQ ID NO: 2689 - RNA, 23 nt, Artificial Sequence
  synthetic polynucleotide
  misc_feature (1)..(23): combination of 2'-fluoro, 2'-O-methyl, phosphorothioate linked ribonucleotides
aggugcaauuuaauuuucauuuu

SEQ ID NO: 2690 - RNA, 23 nt, Artificial Sequence
  synthetic polynucleotide
  misc_feature (1)..(23): combination of 2'-fluoro, 2'-O-methyl, phosphorothioate linked ribonucleotides
agggugcaauuuaauuuucauuu

SEQ ID NO: 2691 - RNA, 23 nt, Artificial Sequence
  synthetic polynucleotide
  misc_feature (1)..(23): combination of 2'-fluoro, 2'-O-methyl, phosphorothioate linked ribonucleotides
auuuggggugcaauuuaauuuuu

SEQ ID NO: 2692 - RNA, 23 nt, Artificial Sequence
  synthetic polynucleotide
  misc_feature (1)..(23): combination of 2'-fluoro, 2'-O-methyl, phosphorothioate linked ribonucleotides
auauuuggggugcaauuuaauuu

SEQ ID NO: 2693 - RNA, 23 nt, Artificial Sequence
  synthetic polynucleotide
  misc_feature (1)..(23): combination of 2'-fluoro, 2'-O-methyl, phosphorothioate linked ribonucleotides
aauauuuggggugcaauuuaauu

SEQ ID NO: 2694 - RNA, 23 nt, Artificial Sequence
  synthetic polynucleotide
  misc_feature (1)..(23): combination of 2'-fluoro, 2'-O-methyl, phosphorothioate linked ribonucleotides
agccauauuuggggugcaauuuu

SEQ ID NO: 2695 - RNA, 23 nt, Artificial Sequence
  synthetic polynucleotide
  misc_feature (1)..(23): combination of 2'-fluoro, 2'-O-methyl, phosphorothioate linked ribonucleotides
aagccauauuuggggugcaauuu

SEQ ID NO: 2696 - RNA, 23 nt, Artificial Sequence
  synthetic polynucleotide
  misc_feature (1)..(23): combination of 2'-fluoro, 2'-O-methyl, phosphorothioate linked ribonucleotides
aaaguggcauuccagccauauuu

SEQ ID NO: 2697 - RNA, 23 nt, Artificial Sequence
  synthetic polynucleotide
  misc_feature (1)..(23): combination of 2'-fluoro, 2'-O-methyl, phosphorothioate linked ribonucleotides
aaaaagggaaguggcauuccauu

SEQ ID NO: 2698 - RNA, 23 nt, Artificial Sequence
  synthetic polynucleotide
  misc_feature (1)..(23): combination of 2'-fluoro, 2'-O-methyl, phosphorothioate linked ribonucleotides
aggcuugagaagaaaagggaauu

SEQ ID NO: 2699 - RNA, 23 nt, Artificial Sequence
  synthetic polynucleotide
  misc_feature (1)..(23): combination of 2'-fluoro, 2'-O-methyl, phosphorothioate linked ribonucleotides
auagcccggggcuugagaagauu

SEQ ID NO: 2700 - RNA, 23 nt, Artificial Sequence
  synthetic polynucleotide
  misc_feature (1)..(23): combination of 2'-fluoro, 2'-O-methyl, phosphorothioate linked ribonucleotides
aagcuagcccggggcuugagauu

SEQ ID NO: 2701 - RNA, 23 nt, Artificial Sequence
  synthetic polynucleotide
  misc_feature (1)..(23): combination of 2'-fluoro, 2'-O-methyl, phosphorothioate linked ribonucleotides
ucuuuaugccauuucaaaagcuu

SEQ ID NO: 2702 - RNA, 23 nt, Artificial Sequence
  synthetic polynucleotide
  misc_feature (1)..(23): combination of 2'-fluoro, 2'-O-methyl, phosphorothioate linked ribonucleotides
aagucuuuaugccauuucaaauu

SEQ ID NO: 2703 - RNA, 23 nt, Artificial Sequence
  synthetic polynucleotide
  misc_feature (1)..(23): combination of 2'-fluoro, 2'-O-methyl, phosphorothioate linked ribonucleotides
aaccucagucuuuaugccauuuu

SEQ ID NO: 2704 - RNA, 23 nt, Artificial Sequence
  synthetic polynucleotide
  misc_feature (1)..(23): combination of 2'-fluoro, 2'-O-methyl, phosphorothioate linked ribonucleotides
aucaccucagucuuuaugccauu

SEQ ID NO: 2705 - RNA, 23 nt, Artificial Sequence
  synthetic polynucleotide
  misc_feature (1)..(23): combination of 2'-fluoro, 2'-O-methyl, phosphorothioate linked ribonucleotides
aggucaccucagucuuuaugcuu

SEQ ID NO: 2706 - RNA, 23 nt, Artificial Sequence
  synthetic polynucleotide
  misc_feature (1)..(23): combination of 2'-fluoro, 2'-O-methyl, phosphorothioate linked ribonucleotides
aauuaauaucugcagugcuucuu

SEQ ID NO: 2707 - RNA, 23 nt, Artificial Sequence
  synthetic polynucleotide
  misc_feature (1)..(23): combination of 2'-fluoro, 2'-O-methyl, phosphorothioate linked ribonucleotides
aauccuccugagcaccuuuaguu

SEQ ID NO: 2708 - RNA, 23 nt, Artificial Sequence
  synthetic polynucleotide
  misc_feature (1)..(23): combination of 2'-fluoro, 2'-O-methyl, phosphorothioate linked ribonucleotides
aaaccauccuccugagcaccuuu

SEQ ID NO: 2709 - RNA, 23 nt, Artificial Sequence
  synthetic polynucleotide
  misc_feature (1)..(23): combination of 2'-fluoro, 2'-O-methyl, phosphorothioate linked ribonucleotides
aacaaccauccuccugagcacuu

SEQ ID NO: 2710 - RNA, 23 nt, Artificial Sequence
  synthetic polynucleotide
  misc_feature (1)..(23): combination of 2'-fluoro, 2'-O-methyl, phosphorothioate linked ribonucleotides
aaugacuacacaaccauccucuu

SEQ ID NO: 2711 - RNA, 23 nt, Artificial Sequence
  synthetic polynucleotide
  misc_feature (1)..(23): combination of 2'-fluoro, 2'-O-methyl, phosphorothioate linked ribonucleotides
acaugacuacacaaccauccuuu

SEQ ID NO: 2712 - RNA, 23 nt, Artificial Sequence
  synthetic polynucleotide
  misc_feature (1)..(23): combination of 2'-fluoro, 2'-O-methyl, phosphorothioate linked ribonucleotides
uccaugacuacacaaccauccuu

SEQ ID NO: 2713 - RNA, 23 nt, Artificial Sequence
  synthetic polynucleotide
  misc_feature (1)..(23): combination of 2'-fluoro, 2'-O-methyl, phosphorothioate linked ribonucleotides
agguccuccaugacuacacaauu

SEQ ID NO: 2714 - RNA, 23 nt, Artificial Sequence
  synthetic polynucleotide
  misc_feature (1)..(23): combination of 2'-fluoro, 2'-O-methyl, phosphorothioate linked ribonucleotides
agauccagggguccuccaugauu

SEQ ID NO: 2715 - RNA, 23 nt, Artificial Sequence
  synthetic polynucleotide
  misc_feature (1)..(23): combination of 2'-fluoro, 2'-O-methyl, phosphorothioate linked ribonucleotides
acgucauuagcugaggggaauuu

SEQ ID NO: 2716 - RNA, 23 nt, Artificial Sequence
  synthetic polynucleotide
  misc_feature (1)..(23): combination of 2'-fluoro, 2'-O-methyl, phosphorothioate linked ribonucleotides
uccgucauuagcugaggggaauu

SEQ ID NO: 2717 - RNA, 23 nt, Artificial Sequence
  synthetic polynucleotide
  misc_feature (1)..(23): combination of 2'-fluoro, 2'-O-methyl, phosphorothioate linked ribonucleotides
auccgucauuagcugaggggauu

SEQ ID NO: 2718 - RNA, 23 nt, Artificial Sequence
  synthetic polynucleotide
  misc_feature (1)..(23): combination of 2'-fluoro, 2'-O-methyl, phosphorothioate linked ribonucleotides
aagcacuccgucauuagcugauu

SEQ ID NO: 2719 - RNA, 23 nt, Artificial Sequence
  synthetic polynucleotide
  misc_feature (1)..(23): combination of 2'-fluoro, 2'-O-methyl, phosphorothioate linked ribonucleotides
aacagaauucagaacuuuuucuu

SEQ ID NO: 2720 - RNA, 23 nt, Artificial Sequence
  synthetic polynucleotide
  misc_feature (1)..(23): combination of 2'-fluoro, 2'-O-methyl, phosphorothioate linked ribonucleotides
uccuccacagaauucagaacuuu

SEQ ID NO: 2721 - RNA, 23 nt, Artificial Sequence
  synthetic polynucleotide
  misc_feature (1)..(23): combination of 2'-fluoro, 2'-O-methyl, phosphorothioate linked ribonucleotides
aguagucuaucugaaaucacuuu

SEQ ID NO: 2722 - RNA, 23 nt, Artificial Sequence
  synthetic polynucleotide
  misc_feature (1)..(23): combination of 2'-fluoro, 2'-O-methyl, phosphorothioate linked ribonucleotides
uuucaguagucuaucugaaauuu

SEQ ID NO: 2723 - RNA, 23 nt, Artificial Sequence
  synthetic polynucleotide
  misc_feature (1)..(23): combination of 2'-fluoro, 2'-O-methyl, phosphorothioate linked ribonucleotides
agguuuucaguagucuaucuguu

SEQ ID NO: 2724 - RNA, 23 nt, Artificial Sequence
  synthetic polynucleotide
  misc_feature (1)..(23): combination of 2'-fluoro, 2'-O-methyl, phosphorothioate linked ribonucleotides
uuaaagguuuucaguagucuauu

SEQ ID NO: 2725 - RNA, 23 nt, Artificial Sequence
  synthetic polynucleotide
  misc_feature (1)..(23): combination of 2'-fluoro, 2'-O-methyl, phosphorothioate linked ribonucleotides
uuuaaagguuuucaguagucuuu

SEQ ID NO: 2726 - RNA, 23 nt, Artificial Sequence
  synthetic polynucleotide
  misc_feature (1)..(23): combination of 2'-fluoro, 2'-O-methyl, phosphorothioate linked ribonucleotides
aaacugacauaugcuuuccuuuu

SEQ ID NO: 2727 - RNA, 23 nt, Artificial Sequence
  synthetic polynucleotide
  misc_feature (1)..(23): combination of 2'-fluoro, 2'-O-methyl, phosphorothioate linked ribonucleotides
acaacugacauaugcuuuccuuu

SEQ ID NO: 2728 - RNA, 23 nt, Artificial Sequence
  synthetic polynucleotide
  misc_feature (1)..(23): combination of 2'-fluoro, 2'-O-methyl, phosphorothioate linked ribonucleotides
aacaacugacauaugcuuuccuu

SEQ ID NO: 2729 - RNA, 23 nt, Artificial Sequence
  synthetic polynucleotide
  misc_feature (1)..(23): combination of 2'-fluoro, 2'-O-methyl, phosphorothioate linked ribonucleotides
uaaacaacugacauaugcuuuuu

SEQ ID NO: 2730 - RNA, 23 nt, Artificial Sequence
  synthetic polynucleotide
  misc_feature (1)..(23): combination of 2'-fluoro, 2'-O-methyl, phosphorothioate linked ribonucleotides
uuaaacaacugacauaugcuuuu

SEQ ID NO: 2731 - RNA, 23 nt, Artificial Sequence
  synthetic polynucleotide
  misc_feature (1)..(23): combination of 2'-fluoro, 2'-O-methyl, phosphorothioate linked ribonucleotides
uuuaaacaacugacauaugcuuu

SEQ ID NO: 2732 - RNA, 23 nt, Artificial Sequence
  synthetic polynucleotide
  misc_feature (1)..(23): combination of 2'-fluoro, 2'-O-methyl, phosphorothioate linked ribonucleotides
aaaaauagauauuggguuuuauu

SEQ ID NO: 2733 - RNA, 23 nt, Artificial Sequence
  synthetic polynucleotide
  misc_feature (1)..(23): combination of 2'-fluoro, 2'-O-methyl, phosphorothioate linked ribonucleotides
uuaaaaaauagauauuggguuuu

SEQ ID NO: 2734 - RNA, 23 nt, Artificial Sequence
  synthetic polynucleotide
  misc_feature (1)..(23): combination of 2'-fluoro, 2'-O-methyl, phosphorothioate linked ribonucleotides
uagaguuauacaaucaguuaauu

SEQ ID NO: 2735 - RNA, 23 nt, Artificial Sequence
  synthetic polynucleotide
  misc_feature (1)..(23): combination of 2'-fluoro, 2'-O-methyl, phosphorothioate linked ribonucleotides
uuagaguuauacaaucaguuauu

SEQ ID NO: 2736 - RNA, 23 nt, Artificial Sequence
  synthetic polynucleotide
  misc_feature (1)..(23): combination of 2'-fluoro, 2'-O-methyl, phosphorothioate linked ribonucleotides
ucuuagaguuauacaaucaguuu

SEQ ID NO: 2737 - RNA, 23 nt, Artificial Sequence
  synthetic polynucleotide
  misc_feature (1)..(23): combination of 2'-fluoro, 2'-O-methyl, phosphorothioate linked ribonucleotides
aucuuagaguuauacaaucaguu

SEQ ID NO: 2738 - RNA, 23 nt, Artificial Sequence
  synthetic polynucleotide
  misc_feature (1)..(23): combination of 2'-fluoro, 2'-O-methyl, phosphorothioate linked ribonucleotides
agaucuuagaguuauacaaucuu

SEQ ID NO: 2739 - RNA, 23 nt, Artificial Sequence
  synthetic polynucleotide
  misc_feature (1)..(23): combination of 2'-fluoro, 2'-O-methyl, phosphorothioate linked ribonucleotides
auaaucaaaggacaaaauggcuu

SEQ ID NO: 2740 - RNA, 23 nt, Artificial Sequence
  synthetic polynucleotide
  misc_feature (1)..(23): combination of 2'-fluoro, 2'-O-methyl, phosphorothioate linked ribonucleotides
ucccaauauaaucaaaggacauu

SEQ ID NO: 2741 - RNA, 23 nt, Artificial Sequence
  synthetic polynucleotide
  misc_feature (1)..(23): combination of 2'-fluoro, 2'-O-methyl, phosphorothioate linked ribonucleotides
ugaaauuacaauauugggccuuu

SEQ ID NO: 2742 - RNA, 23 nt, Artificial Sequence
  synthetic polynucleotide
  misc_feature (1)..(23): combination of 2'-fluoro, 2'-O-methyl, phosphorothioate linked ribonucleotides
uuccauauaacuuucguucuguu

SEQ ID NO: 2743 - RNA, 23 nt, Artificial Sequence
  synthetic polynucleotide
  misc_feature (1)..(23): combination of 2'-fluoro, 2'-O-methyl, phosphorothioate linked ribonucleotides
augguuaaaaugcaucuggaauu

SEQ ID NO: 2744 - RNA, 23 nt, Artificial Sequence
  synthetic polynucleotide
  misc_feature (1)..(23): combination of 2'-fluoro, 2'-O-methyl, phosphorothioate linked ribonucleotides
auccacugugguuaaaaugcauu

SEQ ID NO: 2745 - RNA, 23 nt, Artificial Sequence
  synthetic polynucleotide
  misc_feature (1)..(23): combination of 2'-fluoro, 2'-O-methyl, phosphorothioate linked ribonucleotides
aggaagcugguuauccacugguu

SEQ ID NO: 2746 - RNA, 23 nt, Artificial Sequence
  synthetic polynucleotide
  misc_feature (1)..(23): combination of 2'-fluoro, 2'-O-methyl, phosphorothioate linked ribonucleotides
uaacucuucaguguuuccagcuu

SEQ ID NO: 2747 - RNA, 23 nt, Artificial Sequence
  synthetic polynucleotide
  misc_feature (1)..(23): combination of 2'-fluoro, 2'-O-methyl, phosphorothioate linked ribonucleotides
acgauaacucuucaguguuucuu

SEQ ID NO: 2748 - RNA, 23 nt, Artificial Sequence
  synthetic polynucleotide
  misc_feature (1)..(23): combination of 2'-fluoro, 2'-O-methyl, phosphorothioate linked ribonucleotides
uggcgauaacucuucaguguuuu

SEQ ID NO: 2749 - RNA, 23 nt, Artificial Sequence
  synthetic polynucleotide
  misc_feature (1)..(23): combination of 2'-fluoro, 2'-O-methyl, phosphorothioate linked ribonucleotides
uuccauaaucaguuaaacggguu

SEQ ID NO: 2750 - RNA, 23 nt, Artificial Sequence
  synthetic polynucleotide
  misc_feature (1)..(23): combination of 2'-fluoro, 2'-O-methyl, phosphorothioate linked ribonucleotides
augcuucaaguguugucauuuuu

SEQ ID NO: 2751 - RNA, 23 nt, Artificial Sequence
  synthetic polynucleotide
  misc_feature (1)..(23): combination of 2'-fluoro, 2'-O-methyl, phosphorothioate linked ribonucleotides
ugaaacaccaugcuucaaguguu

SEQ ID NO: 2752 - RNA, 23 nt, Artificial Sequence
  synthetic polynucleotide
  misc_feature (1)..(23): combination of 2'-fluoro, 2'-O-methyl, phosphorothioate linked ribonucleotides
agaaagaacuauuccauaaucuu

SEQ ID NO: 2753 - RNA, 23 nt, Artificial Sequence
  synthetic polynucleotide
  misc_feature (1)..(23): combination of 2'-fluoro, 2'-O-methyl, phosphorothioate linked ribonucleotides
aagaaagaacuauuccauaauuu

SEQ ID NO: 2754 - RNA, 23 nt, Artificial Sequence
  synthetic polynucleotide
  misc_feature (1)..(23): combination of 2'-fluoro, 2'-O-methyl, phosphorothioate linked ribonucleotides
aauugaagcauugagacaccauu

SEQ ID NO: 2755 - RNA, 23 nt, Artificial Sequence
  synthetic polynucleotide
  misc_feature (1)..(23): combination of 2'-fluoro, 2'-O-methyl, phosphorothioate linked ribonucleotides
uuuucagaauccugucuugucuu

SEQ ID NO: 2756 - RNA, 23 nt, Artificial Sequence
  synthetic polynucleotide
  misc_feature (1)..(23): combination of 2'-fluoro, 2'-O-methyl, phosphorothioate linked ribonucleotides
auuuuaaacaacugacauauguu

SEQ ID NO: 2757 - RNA, 23 nt, Artificial Sequence
  synthetic polynucleotide
  misc_feature (1)..(23): combination of 2'-fluoro, 2'-O-methyl, phosphorothioate linked ribonucleotides
aauauuggguuuuaaacaacuuu

SEQ ID NO: 2758 - RNA, 23 nt, Artificial Sequence
  synthetic polynucleotide
  misc_feature (1)..(23): combination of 2'-fluoro, 2'-O-methyl, phosphorothioate linked ribonucleotides
uagauauuggguuuuaaacaauu

SEQ ID NO: 2759 - RNA, 23 nt, Artificial Sequence
  synthetic polynucleotide
  misc_feature (1)..(23): combination of 2'-fluoro, 2'-O-methyl, phosphorothioate linked ribonucleotides
aaauaaaaaauauacuucaucuu

SEQ ID NO: 2760 - RNA, 23 nt, Artificial Sequence
  synthetic polynucleotide
  misc_feature (1)..(23): combination of 2'-fluoro, 2'-O-methyl, phosphorothioate linked ribonucleotides
aaggacaaaauggcaauaaaauu

SEQ ID NO: 2761 - RNA, 23 nt, Artificial Sequence
  synthetic polynucleotide
  misc_feature (1)..(23): combination of 2'-fluoro, 2'-O-methyl, phosphorothioate linked ribonucleotides
aucaaaggacaaaauggcaauuu

SEQ ID NO: 2762 - RNA, 23 nt, Artificial Sequence
  synthetic polynucleotide
  misc_feature (1)..(23): combination of 2'-fluoro, 2'-O-methyl, phosphorothioate linked ribonucleotides
auuuagucaacuucccaauauuu

SEQ ID NO: 2763 - RNA, 23 nt, Artificial Sequence
  synthetic polynucleotide
  misc_feature (1)..(23): combination of 2'-fluoro, 2'-O-methyl, phosphorothioate linked ribonucleotides
uuucaaguuuagucaacuuccuu

SEQ ID NO: 2764 - RNA, 23 nt, Artificial Sequence
  synthetic polynucleotide
  misc_feature (1)..(23): combination of 2'-fluoro, 2'-O-methyl, phosphorothioate linked ribonucleotides
uagcuuccauuuauucacaguuu

SEQ ID NO: 2765 - RNA, 23 nt, Artificial Sequence
  synthetic polynucleotide
  misc_feature (1)..(23): combination of 2'-fluoro, 2'-O-methyl, phosphorothioate linked ribonucleotides
agugucugaguaagcaaucuguu

SEQ ID NO: 2766 - RNA, 23 nt, Artificial Sequence
  synthetic polynucleotide
  misc_feature (1)..(23): combination of 2'-fluoro, 2'-O-methyl, phosphorothioate linked ribonucleotides
acacuggcgauaacucuucaguu

SEQ ID NO: 2767 - RNA, 23 nt, Artificial Sequence
  synthetic polynucleotide
  misc_feature (1)..(23): combination of 2'-fluoro, 2'-O-methyl, phosphorothioate linked ribonucleotides
auaacuuucguucugaaggguuu

SEQ ID NO: 2768 - RNA, 23 nt, Artificial Sequence
  synthetic polynucleotide
  misc_feature (1)..(23): combination of 2'-fluoro, 2'-O-methyl, phosphorothioate linked ribonucleotides
acuuucguucugaagggucacuu

SEQ ID NO: 2769 - RNA, 23 nt, Artificial Sequence
  synthetic polynucleotide
  misc_feature (1)..(23): combination of 2'-fluoro, 2'-O-methyl, phosphorothioate linked ribonucleotides
uccauauaacuuucguucugauu

SEQ ID NO: 2770 - RNA, 23 nt, Artificial Sequence
  synthetic polynucleotide
  misc_feature (1)..(23): combination of 2'-fluoro, 2'-O-methyl, phosphorothioate linked ribonucleotides
auuccacgucaccaauaagaauu

SEQ ID NO: 2771 - RNA, 23 nt, Artificial Sequence
  synthetic polynucleotide
  misc_feature (1)..(23): combination of 2'-fluoro, 2'-O-methyl, phosphorothioate linked ribonucleotides
auggugauuuuccauauaacuuu

SEQ ID NO: 2772 - RNA, 23 nt, Artificial Sequence
  synthetic polynucleotide
  misc_feature (1)..(23): combination of 2'-fluoro, 2'-O-methyl, phosphorothioate linked ribonucleotides
uauaacuuucguucugaaggguu

SEQ ID NO: 2773 - RNA, 23 nt, Artificial Sequence
  synthetic polynucleotide
  misc_feature (1)..(23): combination of 2'-fluoro, 2'-O-methyl, phosphorothioate linked ribonucleotides
auauaacuuucguucugaagguu

SEQ ID NO: 2774 - RNA, 23 nt, Artificial Sequence
  synthetic polynucleotide
  misc_feature (1)..(23): combination of 2'-fluoro, 2'-O-methyl, phosphorothioate linked ribonucleotides
aauauaacuuucguucugaaguu

SEQ ID NO: 2775 - RNA, 23 nt, Artificial Sequence
  synthetic polynucleotide
  misc_feature (1)..(23): combination of 2'-fluoro, 2'-O-methyl, phosphorothioate linked ribonucleotides
acaauauugggccugaaguuguu

SEQ ID NO: 2776 - RNA, 23 nt, Artificial Sequence
  synthetic polynucleotide
  misc_feature (1)..(23): combination of 2'-fluoro, 2'-O-methyl, phosphorothioate linked ribonucleotides
agauaacucuucaguguuuccuu

SEQ ID NO: 2777 - RNA, 23 nt, Artificial Sequence
  synthetic polynucleotide
  misc_feature (1)..(23): combination of 2'-fluoro, 2'-O-methyl, phosphorothioate linked ribonucleotides
uuacaauauugggccugaaguuu

SEQ ID NO: 2778 - RNA, 23 nt, Artificial Sequence
  synthetic polynucleotide
  misc_feature (1)..(23): combination of 2'-fluoro, 2'-O-methyl, phosphorothioate linked ribonucleotides
ugaaguugguugcuuuaacuuuu

SEQ ID NO: 2779 - RNA, 23 nt, Artificial Sequence
  synthetic polynucleotide
  misc_feature (1)..(23): combination of 2'-fluoro, 2'-O-methyl, phosphorothioate linked ribonucleotides
auuacaauauugggccugaaguu

SEQ ID NO: 2780 - RNA, 23 nt, Artificial Sequence
  synthetic polynucleotide
  misc_feature (1)..(23): combination of 2'-fluoro, 2'-O-methyl, phosphorothioate linked ribonucleotides
aucugaguaagcaaucuggucuu

SEQ ID NO: 2781 - RNA, 23 nt, Artificial Sequence
  synthetic polynucleotide
  misc_feature (1)..(23): combination of 2'-fluoro, 2'-O-methyl, phosphorothioate linked ribonucleotides
aagaacuauuccauaaucaguuu

SEQ ID NO: 2782 - RNA, 23 nt, Artificial Sequence
  synthetic polynucleotide
  misc_feature (1)..(23): combination of 2'-fluoro, 2'-O-methyl, phosphorothioate linked ribonucleotides
aagaguggugauuuuccauauuu

SEQ ID NO: 2783 - RNA, 23 nt, Artificial Sequence
  synthetic polynucleotide
  misc_feature (1)..(23): combination of 2'-fluoro, 2'-O-methyl, phosphorothioate linked ribonucleotides
aacugggacauugaagcauuguu

SEQ ID NO: 2784 - RNA, 23 nt, Artificial Sequence
  synthetic polynucleotide
  misc_feature (1)..(23): combination of 2'-fluoro, 2'-O-methyl, phosphorothioate linked ribonucleotides
uugcacugggacauugaagcauu

SEQ ID NO: 2785 - RNA, 23 nt, Artificial Sequence
  synthetic polynucleotide
  misc_feature (1)..(23): combination of 2'-fluoro, 2'-O-methyl, phosphorothioate linked ribonucleotides
ucagaauccugucuugucauuuu

SEQ ID NO: 2786 - RNA, 23 nt, Artificial Sequence
  synthetic polynucleotide
  misc_feature (1)..(23): combination of 2'-fluoro, 2'-O-methyl, phosphorothioate linked ribonucleotides
auauacuucaucagaucuuaguu

SEQ ID NO: 2787 - RNA, 23 nt, Artificial Sequence
  synthetic polynucleotide
  misc_feature (1)..(23): combination of 2'-fluoro, 2'-O-methyl, phosphorothioate linked ribonucleotides
auugaagcauugagacaccaguu

SEQ ID NO: 2788 - RNA, 23 nt, Artificial Sequence
  synthetic polynucleotide
  misc_feature (1)..(23): combination of 2'-fluoro, 2'-O-methyl, phosphorothioate linked ribonucleotides
agacauugaagcauugagacauu

SEQ ID NO: 2789 - RNA, 23 nt, Artificial Sequence
  synthetic polynucleotide
  misc_feature (1)..(23): combination of 2'-fluoro, 2'-O-methyl, phosphorothioate linked ribonucleotides
aagauccagaucuauggaaaauu

SEQ ID NO: 2790 - RNA, 23 nt, Artificial Sequence
  synthetic polynucleotide
  misc_feature (1)..(23): combination of 2'-fluoro, 2'-O-methyl, phosphorothioate linked ribonucleotides
auuucguucugaagggucacauu

SEQ ID NO: 2791 - RNA, 23 nt, Artificial Sequence
  synthetic polynucleotide
  misc_feature (1)..(23): combination of 2'-fluoro, 2'-O-methyl, phosphorothioate linked ribonucleotides
ucguucugaagggucacacuguu

SEQ ID NO: 2792 - RNA, 23 nt, Artificial Sequence
  synthetic polynucleotide
  misc_feature (1)..(23): combination of 2'-fluoro, 2'-O-methyl, phosphorothioate linked ribonucleotides
auuccagccauauuugggguguu

SEQ ID NO: 2793 - RNA, 23 nt, Artificial Sequence
  synthetic polynucleotide
  misc_feature (1)..(23): combination of 2'-fluoro, 2'-O-methyl, phosphorothioate linked ribonucleotides
augggacauugaagcauugaguu

SEQ ID NO: 2794 - RNA, 23 nt, Artificial Sequence
  synthetic polynucleotide
  misc_feature (1)..(23): combination of 2'-fluoro, 2'-O-methyl, phosphorothioate linked ribonucleotides
agggaguuuucagaauccuguuu

SEQ ID NO: 2795 - RNA, 23 nt, Artificial Sequence
  synthetic polynucleotide
  misc_feature (1)..(23): combination of 2'-fluoro, 2'-O-methyl, phosphorothioate linked ribonucleotides
ugaggggaauggcaaggauccuu

SEQ ID NO: 2796 - RNA, 23 nt, Artificial Sequence
  synthetic polynucleotide
  misc_feature (1)..(23): combination of 2'-fluoro, 2'-O-methyl, phosphorothioate linked ribonucleotides
auggaaaauuaauaucugcaguu

SEQ ID NO: 2797 - RNA, 23 nt, Artificial Sequence
  synthetic polynucleotide
  misc_feature (1)..(23): combination of 2'-fluoro, 2'-O-methyl, phosphorothioate linked ribonucleotides
aaauauacuucaucagaucuuuu

SEQ ID NO: 2798 - RNA, 23 nt, Artificial Sequence
  synthetic polynucleotide
  misc_feature (1)..(23): combination of 2'-fluoro, 2'-O-methyl, phosphorothioate linked ribonucleotides
agucggaacaagucugcuauuuu

SEQ ID NO: 2799 - RNA, 23 nt, Artificial Sequence
  synthetic polynucleotide
  misc_feature (1)..(23): combination of 2'-fluoro, 2'-O-methyl, phosphorothioate linked ribonucleotides
aaccaugcuucaaguguugucuu

SEQ ID NO: 2800 - RNA, 23 nt, Artificial Sequence
  synthetic polynucleotide
  misc_feature (1)..(23): combination of 2'-fluoro, 2'-O-methyl, phosphorothioate linked ribonucleotides
aggaaauccaaugcugucugauu

SEQ ID NO: 2801 - RNA, 23 nt, Artificial Sequence
  synthetic polynucleotide
  misc_feature (1)..(23): combination of 2'-fluoro, 2'-O-methyl, phosphorothioate linked ribonucleotides
acaaagaguggugauuuuccauu

SEQ ID NO: 2802 - RNA, 23 nt, Artificial Sequence
  synthetic polynucleotide
  misc_feature (1)..(23): combination of 2'-fluoro, 2'-O-methyl, phosphorothioate linked ribonucleotides
uuaggaaauccaaugcugucuuu

SEQ ID NO: 2803 - RNA, 23 nt, Artificial Sequence
  synthetic polynucleotide
  misc_feature (1)..(23): combination of 2'-fluoro, 2'-O-methyl, phosphorothioate linked ribonucleotides
aaagaacuauuccauaaucaguu

SEQ ID NO: 2804 - RNA, 20 nt, Artificial Sequence
  synthetic polynucleotide
augcuucaaugucccaguuu

SEQ ID NO: 2805 - RNA, 20 nt, Artificial Sequence
  synthetic polynucleotide
gaacgaaaguuauauggaau

SEQ ID NO: 2806 - RNA, 20 nt, Artificial Sequence
  synthetic polynucleotide
gauugcuuacucagacacuu

SEQ ID NO: 2807 - RNA, 20 nt, Artificial Sequence
  synthetic polynucleotide
caaugcuucaaugucccauu

SEQ ID NO: 2808 - RNA, 20 nt, Artificial Sequence
  synthetic polynucleotide
guuuaaaacccaauaucuau

SEQ ID NO: 2809 - RNA, 20 nt, Artificial Sequence
  synthetic polynucleotide
cuucaaugucccagugcaau

SEQ ID NO: 2810 - RNA, 20 nt, Artificial Sequence
  synthetic polynucleotide
agacagcauuggauuuccuu

SEQ ID NO: 2811 - RNA, 20 nt, Artificial Sequence
  synthetic polynucleotide
gaaaaucaccacucuuuguu

SEQ ID NO: 2812 - RNA, 20 nt, Artificial Sequence
  synthetic polynucleotide
acagcauuggauuuccuaau

SEQ ID NO: 2813 - RNA, 20 nt, Artificial Sequence
  synthetic polynucleotide
aggauucugaaaacucccuu

SEQ ID NO: 2814 - RNA, 20 nt, Artificial Sequence
  synthetic polynucleotide
caacacuugaagcaugguuu

SEQ ID NO: 2815 - RNA, 20 nt, Artificial Sequence
  synthetic polynucleotide
cuguuuaaaacccaauaucu

SEQ ID NO: 2816 - RNA, 20 nt, Artificial Sequence
  synthetic polynucleotide
cgcuucaaugucccagugca

SEQ ID NO: 2817 - RNA, 20 nt, Artificial Sequence
  synthetic polynucleotide
ccagacagcauuggauuucc

SEQ ID NO: 2818 - RNA, 20 nt, Artificial Sequence
  synthetic polynucleotide
cggaaaaucaccacucuuug

SEQ ID NO: 2819 - RNA, 20 nt, Artificial Sequence
  synthetic polynucleotide
ggacagcauuggauuuccua

SEQ ID NO: 2820 - RNA, 20 nt, Artificial Sequence
  synthetic polynucleotide
gcaggauucugaaaacuccc

SEQ ID NO: 2821 - RNA, 20 nt, Artificial Sequence
  synthetic polynucleotide
gauggcuuguuccagauguu

SEQ ID NO: 2822 - RNA, 20 nt, Artificial Sequence
  synthetic polynucleotide
uccuggaauauuagaugcuu

SEQ ID NO: 2823 - RNA, 20 nt, Artificial Sequence
  synthetic polynucleotide
ucuaagaucugaugaaguau

SEQ ID NO: 2824 - RNA, 20 nt, Artificial Sequence
  synthetic polynucleotide
cccuggaauauuagaugccu

SEQ ID NO: 2825 - RNA, 20 nt, Artificial Sequence
  synthetic polynucleotide
gcucuaagaucugaugaagu

SEQ ID NO: 2826 - RNA, 20 nt, Artificial Sequence
  synthetic polynucleotide
cguccuggaauauuagaugc

SEQ ID NO: 2827 - RNA, 20 nt, Artificial Sequence
  synthetic polynucleotide
caacucuaagaucugaugaa

SEQ ID NO: 2828 - RNA, 20 nt, Artificial Sequence
  synthetic polynucleotide
ggaagaaaagugauucagug

SEQ ID NO: 2829 - RNA, 20 nt, Artificial Sequence
  synthetic polynucleotide
guccaggaauauuagaugcc

SEQ ID NO: 2830 - RNA, 20 nt, Artificial Sequence
  synthetic polynucleotide
gugcuggaauauuagaugcc

SEQ ID NO: 2831 - RNA, 20 nt, Artificial Sequence
  synthetic polynucleotide
uccucgaauauuagaugccu

SEQ ID NO: 2832 - RNA, 20 nt, Artificial Sequence
  synthetic polynucleotide
ucguggaauauuagaugccu

SEQ ID NO: 2833 - RNA, 20 nt, Artificial Sequence
  synthetic polynucleotide
acacuaagaucugaugaagu

SEQ ID NO: 2834 - RNA, 20 nt, Artificial Sequence
  synthetic polynucleotide
agucuaagaucugaugaagu

SEQ ID NO: 2835 - RNA, 20 nt, Artificial Sequence
  synthetic polynucleotide
agucagcauuggauuuccua

SEQ ID NO: 2836 - RNA, 20 nt, Artificial Sequence
  synthetic polynucleotide
acacagcauuggauuuccua

SEQ ID NO: 2837 - RNA, 20 nt, Artificial Sequence
  synthetic polynucleotide
ugauggcuuguuccagaugc

SEQ ID NO: 2838 - RNA, 20 nt, Artificial Sequence
  synthetic polynucleotide
gauggcuuguuccagaugca

SEQ ID NO: 2839 - RNA, 20 nt, Artificial Sequence
  synthetic polynucleotide
cucagacagcauuggauuuc

SEQ ID NO: 2840 - RNA, 20 nt, Artificial Sequence
  synthetic polynucleotide
ugccauuuuguccuuugauu

SEQ ID NO: 2841 - RNA, 20 nt, Artificial Sequence
  synthetic polynucleotide
ccauuuuguccuuugauuau

SEQ ID NO: 2842 - RNA, 20 nt, Artificial Sequence
  synthetic polynucleotide
uuuucacauuuuucgucuuu

SEQ ID NO: 2843 - RNA, 20 nt, Artificial Sequence
  synthetic polynucleotide
acucuaagaucugaugaauu

SEQ ID NO: 2844 - RNA, 20 nt, Artificial Sequence
  synthetic polynucleotide
aagaaaagugauucagugau

SEQ ID NO: 2845 - RNA, 20 nt, Artificial Sequence
  synthetic polynucleotide
auauuagaugccuuuuaaau

SEQ ID NO: 2846 - RNA, 20 nt, Artificial Sequence
  synthetic polynucleotide
gaaagcauaugucaguuguu

SEQ ID NO: 2847 - RNA, 20 nt, Artificial Sequence
  synthetic polynucleotide
cauuuuguccuuugauuauu

SEQ ID NO: 2848 - RNA, 20 nt, Artificial Sequence
  synthetic polynucleotide
auauagucucaauaacuuau

SEQ ID NO: 2849 - RNA, 20 nt, Artificial Sequence
  synthetic polynucleotide
ccaagagcgcagacuugcau

SEQ ID NO: 2850 - RNA, 20 nt, Artificial Sequence
  synthetic polynucleotide
ugccuuuuaaaaauguucuu

SEQ ID NO: 2851 - RNA, 20 nt, Artificial Sequence
  synthetic polynucleotide
guccuggaauauuagauguu

SEQ ID NO: 2852 - RNA, 20 nt, Artificial Sequence
  synthetic polynucleotide
ccuaagaucugaugaaguau

SEQ ID NO: 2853 - RNA, 20 nt, Artificial Sequence
  synthetic polynucleotide
uagcagacuuguuccgacuu

SEQ ID NO: 2854 - RNA, 20 nt, Artificial Sequence
  synthetic polynucleotide
ccguuuaacugauuauggau

SEQ ID NO: 2855 - RNA, 20 nt, Artificial Sequence
  synthetic polynucleotide
gacaacacuugaagcauguu

SEQ ID NO: 2856 - RNA, 20 nt, Artificial Sequence
  synthetic polynucleotide
uugccauuuuguccuuugau

SEQ ID NO: 2857 - RNA, 20 nt, Artificial Sequence
  synthetic polynucleotide
uaacucuaagaucugaugau

SEQ ID NO: 2858 - RNA, 20 nt, Artificial Sequence
  synthetic polynucleotide
gucucaaugcuucaauguuu

SEQ ID NO: 2859 - RNA, 20 nt, Artificial Sequence
  synthetic polynucleotide
gugauggcuuguuccggaug

SEQ ID NO: 2860 - RNA, 20 nt, Artificial Sequence
  synthetic polynucleotide
gugauggcuuguugcagaug

SEQ ID NO: 2861 - RNA, 20 nt, Artificial Sequence
  synthetic polynucleotide
cagaacgaaaguuaugugga

SEQ ID NO: 2862 - RNA, 20 nt, Artificial Sequence
  synthetic polynucleotide
cagaacgaaaguuguaugga

SEQ ID NO: 2863 - RNA, 20 nt, Artificial Sequence
  synthetic polynucleotide
uauguccuggaauauaagau

SEQ ID NO: 2864 - RNA, 20 nt, Artificial Sequence
  synthetic polynucleotide
uauguccuggaauguuagau

SEQ ID NO: 2865 - RNA, 20 nt, Artificial Sequence
  synthetic polynucleotide
auguccuggaauauuggaug

SEQ ID NO: 2866 - RNA, 20 nt, Artificial Sequence
  synthetic polynucleotide
auguccuggaauaauagaug

SEQ ID NO: 2867 - RNA, 20 nt, Artificial Sequence
  synthetic polynucleotide
uguccuggaauauuaaaugc

SEQ ID NO: 2868 - RNA, 20 nt, Artificial Sequence
  synthetic polynucleotide
uguccuggaauauaagaugc

SEQ ID NO: 2869 - RNA, 20 nt, Artificial Sequence
  synthetic polynucleotide
ccuggaauauuaggugccuu

SEQ ID NO: 2870 - RNA, 20 nt, Artificial Sequence
  synthetic polynucleotide
ccuggaauauuggaugccuu

SEQ ID NO: 2871 - RNA, 20 nt, Artificial Sequence
  synthetic polynucleotide
uccuggaauauuagaagccu

SEQ ID NO: 2872 - RNA, 20 nt, Artificial Sequence
  synthetic polynucleotide
uccuggaauauuaaaugccu

SEQ ID NO: 2873 - RNA, 20 nt, Artificial Sequence
  synthetic polynucleotide
ccuggaauauuagauaccuu

SEQ ID NO: 2874 - RNA, 20 nt, Artificial Sequence
  synthetic polynucleotide
cuggaauauuagauggcuuu

SEQ ID NO: 2875 - RNA, 20 nt, Artificial Sequence
  synthetic polynucleotide
cuggaauauuagaagccuuu

SEQ ID NO: 2876 - RNA, 20 nt, Artificial Sequence
  synthetic polynucleotide
gaauauuagaugccuauuaa

SEQ ID NO: 2877 - RNA, 20 nt, Artificial Sequence
  synthetic polynucleotide
gaauauuagaugcguuuuaa

SEQ ID NO: 2878 - RNA, 20 nt, Artificial Sequence
  synthetic polynucleotide
gaugccuuuuaaaaaaguuc

SEQ ID NO: 2879 - RNA, 20 nt, Artificial Sequence
  synthetic polynucleotide
gaugccuuuuaaagauguuc

SEQ ID NO: 2880 - RNA, 20 nt, Artificial Sequence
  synthetic polynucleotide
gauuuucacauuuuuggucu

SEQ ID NO: 2881 - RNA, 20 nt, Artificial Sequence
  synthetic polynucleotide
gauuuucacauuuaucgucu

SEQ ID NO: 2882 - RNA, 20 nt, Artificial Sequence
  synthetic polynucleotide
cucaaugcuucaaugaccca

SEQ ID NO: 2883 - RNA, 20 nt, Artificial Sequence
  synthetic polynucleotide
cucaaugcuucaaaguccca

SEQ ID NO: 2884 - RNA, 20 nt, Artificial Sequence
  synthetic polynucleotide
caaugcuucaaugucgcagu

SEQ ID NO: 2885 - RNA, 20 nt, Artificial Sequence
  synthetic polynucleotide
caaugcuucaaugacccagu

SEQ ID NO: 2886 - RNA, 20 nt, Artificial Sequence
  synthetic polynucleotide
aaauauagucucaaugacuu

SEQ ID NO: 2887 - RNA, 20 nt, Artificial Sequence
  synthetic polynucleotide
aaauauagucucaguaacuu

SEQ ID NO: 2888 - RNA, 20 nt, Artificial Sequence
  synthetic polynucleotide
gcaggauucugaaaaguccc

SEQ ID NO: 2889 - RNA, 20 nt, Artificial Sequence
  synthetic polynucleotide
gcaggauucugaagacuccc

SEQ ID NO: 2890 - RNA, 20 nt, Artificial Sequence
  synthetic polynucleotide
uaccaagagcgcagaguugc

SEQ ID NO: 2891 - RNA, 20 nt, Artificial Sequence
  synthetic polynucleotide
uaccaagagcgcaaacuugc

SEQ ID NO: 2892 - RNA, 20 nt, Artificial Sequence
  synthetic polynucleotide
aggaaagcauaugucgguug

SEQ ID NO: 2893 - RNA, 20 nt, Artificial Sequence
  synthetic polynucleotide
aggaaagcauaugacaguug

SEQ ID NO: 2894 - RNA, 20 nt, Artificial Sequence
  synthetic polynucleotide
guuuaaaacccaaaaucuau

SEQ ID NO: 2895 - RNA, 20 nt, Artificial Sequence
  synthetic polynucleotide
guuuaaaacccgauaucuau

SEQ ID NO: 2896 - RNA, 20 nt, Artificial Sequence
  synthetic polynucleotide
uuaacugauuguauagcucu

SEQ ID NO: 2897 - RNA, 20 nt, Artificial Sequence
  synthetic polynucleotide
uuaacugauuguaaaacucu

SEQ ID NO: 2898 - RNA, 20 nt, Artificial Sequence
  synthetic polynucleotide
uaacucuaagaucuggugaa

SEQ ID NO: 2899 - RNA, 20 nt, Artificial Sequence
  synthetic polynucleotide
uaacucuaagaucagaugaa

SEQ ID NO: 2900 - RNA, 20 nt, Artificial Sequence
  synthetic polynucleotide
acucuaagaucugauaaagu

SEQ ID NO: 2901 - RNA, 20 nt, Artificial Sequence
  synthetic polynucleotide
acucuaagaucuggugaagu

SEQ ID NO: 2902 - RNA, 20 nt, Artificial Sequence
  synthetic polynucleotide
uauugccauuuugucguuug

SEQ ID NO: 2903 - RNA, 20 nt, Artificial Sequence
  synthetic polynucleotide
uauugccauuuugaccuuug

SEQ ID NO: 2904 - RNA, 20 nt, Artificial Sequence
  synthetic polynucleotide
gccauuuuguccuuuaauua

SEQ ID NO: 2905 - RNA, 20 nt, Artificial Sequence
  synthetic polynucleotide
gccauuuuguccuaugauua

SEQ ID NO: 2906 - RNA, 23 nt, Artificial Sequence
  synthetic polynucleotide
uuuuucaaguuuagucaacuuuu

SEQ ID NO: 2907 - RNA, 21 nt, Artificial Sequence
  synthetic polynucleotide
aacugggacauugaagcauuu

SEQ ID NO: 2908 - RNA, 21 nt, Artificial Sequence
  synthetic polynucleotide
uuccauauaacuuucguucuu

SEQ ID NO: 2909 - RNA, 21 nt, Artificial Sequence
  synthetic polynucleotide
agugucugaguaagcaaucuu

SEQ ID NO: 2910 - RNA, 23 nt, Artificial Sequence
  synthetic polynucleotide
auuacaauauugggccugaagug

SEQ ID NO: 2911 - RNA, 23 nt, Artificial Sequence
  synthetic polynucleotide
aacugggacauugaagcauugug

SEQ ID NO: 2912 - RNA, 23 nt, Artificial Sequence
  synthetic polynucleotide
uuccauauaacuuucguucugug

SEQ ID NO: 2913 - RNA, 23 nt, Artificial Sequence
  synthetic polynucleotide
uuucaaguuuagucaacuuccug

SEQ ID NO: 2914 - RNA, 23 nt, Artificial Sequence
  synthetic polynucleotide
aggaagcugguuauccacuggug

SEQ ID NO: 2915 - RNA, 23 nt, Artificial Sequence
  synthetic polynucleotide
auauacuucaucagaucuuagug

SEQ ID NO: 2916 - RNA, 23 nt, Artificial Sequence
  synthetic polynucleotide
agugucugaguaagcaaucugug

SEQ ID NO: 2917 - RNA, 23 nt, Artificial Sequence
  synthetic polynucleotide
aacugggacauugaagcauugag

SEQ ID NO: 2918 - RNA, 21 nt, Artificial Sequence
  synthetic polynucleotide
auuacaauauugggccugaag

SEQ ID NO: 2919 - RNA, 21 nt, Artificial Sequence
  synthetic polynucleotide
aacugggacauugaagcauug

SEQ ID NO: 2920 - RNA, 21 nt, Artificial Sequence
  synthetic polynucleotide
uuccauauaacuuucguucug

SEQ ID NO: 2921 - RNA, 21 nt, Artificial Sequence
  synthetic polynucleotide
uuucaaguuuagucaacuucc

SEQ ID NO: 2922 - RNA, 21 nt, Artificial Sequence
  synthetic polynucleotide
aggaagcugguuauccacugg

SEQ ID NO: 2923 - RNA, 21 nt, Artificial Sequence
  synthetic polynucleotide
auauacuucaucagaucuuag

SEQ ID NO: 2924 - RNA, 21 nt, Artificial Sequence
  synthetic polynucleotide
agugucugaguaagcaaucug

SEQ ID NO: 2925 - RNA, 21 nt, Artificial Sequence
  synthetic polynucleotide
augggacauugaagcauuguu

SEQ ID NO: 2926 - RNA, 21 nt, Artificial Sequence
  synthetic polynucleotide
uagauauuggguuuuaaacuu

SEQ ID NO: 2927 - RNA, 21 nt, Artificial Sequence
  synthetic polynucleotide
uugcacugggacauugaaguu

SEQ ID NO: 2928 - RNA, 21 nt, Artificial Sequence
  synthetic polynucleotide
aggaaauccaaugcugucuuu

SEQ ID NO: 2929 - RNA, 21 nt, Artificial Sequence
  synthetic polynucleotide
acaaagaguggugauuuucuu

SEQ ID NO: 2930 - RNA, 21 nt, Artificial Sequence
  synthetic polynucleotide
uuaggaaauccaaugcuguuu

SEQ ID NO: 2931 - RNA, 21 nt, Artificial Sequence
  synthetic polynucleotide
agggaguuuucagaauccuuu

SEQ ID NO: 2932 - RNA, 21 nt, Artificial Sequence
  synthetic polynucleotide
aaccaugcuucaaguguuguu

SEQ ID NO: 2933 - RNA, 21 nt, Artificial Sequence
  synthetic polynucleotide
augggacauugaagcauugag

SEQ ID NO: 2934 - RNA, 21 nt, Artificial Sequence
  synthetic polynucleotide
uagauauuggguuuuaaacaa

SEQ ID NO: 2935 - RNA, 21 nt, Artificial Sequence
  synthetic polynucleotide
uugcacugggacauugaagca

SEQ ID NO: 2936 - RNA, 21 nt, Artificial Sequence
  synthetic polynucleotide
aggaaauccaaugcugucuga

SEQ ID NO: 2937 - RNA, 21 nt, Artificial Sequence
  synthetic polynucleotide
acaaagaguggugauuuucca

SEQ ID NO: 2938 - RNA, 21 nt, Artificial Sequence
  synthetic polynucleotide
uuaggaaauccaaugcugucu

SEQ ID NO: 2939 - RNA, 21 nt, Artificial Sequence
  synthetic polynucleotide
agggaguuuucagaauccugu

SEQ ID NO: 2940 - RNA, 21 nt, Artificial Sequence
  synthetic polynucleotide
aaccaugcuucaaguguuguc

SEQ ID NO: 2941 - RNA, 23 nt, Artificial Sequence
  synthetic polynucleotide
uagauauuggguuuuaaacaguu

SEQ ID NO: 2942 - RNA, 23 nt, Artificial Sequence
  synthetic polynucleotide
uugcacugggacauugaagcguu

SEQ ID NO: 2943 - RNA, 23 nt, Artificial Sequence
  synthetic polynucleotide
aggaaauccaaugcugucugguu

SEQ ID NO: 2944 - RNA, 23 nt, Artificial Sequence
  synthetic polynucleotide
acaaagaguggugauuuuccguu

SEQ ID NO: 2945 - RNA, 23 nt, Artificial Sequence
  synthetic polynucleotide
uuaggaaauccaaugcuguccuu

SEQ ID NO: 2946 - RNA, 23 nt, Artificial Sequence
  synthetic polynucleotide
agggaguuuucagaauccugcuu

SEQ ID NO: 2947 - RNA, 21 nt, Artificial Sequence
  synthetic polynucleotide
acaucuggaacaagccaucuu

SEQ ID NO: 2948 - RNA, 21 nt, Artificial Sequence
  synthetic polynucleotide
agcaucuaauauuccaggauu

SEQ ID NO: 2949 - RNA, 21 nt, Artificial Sequence
  synthetic polynucleotide
aggcaucuaauauuccagguu

SEQ ID NO: 2950 - RNA, 21 nt, Artificial Sequence
  synthetic polynucleotide
uacuucaucagaucuuagauu

SEQ ID NO: 2951 - RNA, 21 nt, Artificial Sequence
  synthetic polynucleotide
aaggcaucuaauauuccaguu

SEQ ID NO: 2952 - RNA, 21 nt, Artificial Sequence
  synthetic polynucleotide
acaucuggaacaagccaucac

SEQ ID NO: 2953 - RNA, 21 nt, Artificial Sequence
  synthetic polynucleotide
agcaucuaauauuccaggaca

SEQ ID NO: 2954 - RNA, 21 nt, Artificial Sequence
  synthetic polynucleotide
aggcaucuaauauuccaggac

SEQ ID NO: 2955 - RNA, 21 nt, Artificial Sequence
  synthetic polynucleotide
uacuucaucagaucuuagagu

SEQ ID NO: 2956 - RNA, 21 nt, Artificial Sequence
  synthetic polynucleotide
aaggcaucuaauauuccagga

SEQ ID NO: 2957 - RNA, 23 nt, Artificial Sequence
  synthetic polynucleotide
aaggcaucuaauauuccaggguu

SEQ ID NO: 2958 - RNA, 23 nt, Artificial Sequence
  synthetic polynucleotide
uacuucaucagaucuuagagcuu

SEQ ID NO: 2959 - RNA, 23 nt, Artificial Sequence
  synthetic polynucleotide
agcaucuaauauuccaggacguu

SEQ ID NO: 2960 - RNA, 23 nt, Artificial Sequence
  synthetic polynucleotide
auucaucagaucuuagaguuguu

SEQ ID NO: 2961 - RNA, 23 nt, Artificial Sequence
  synthetic polynucleotide
ucacugaaucacuuuucuuccuu

SEQ ID NO: 2962 - RNA, 23 nt, Artificial Sequence
  synthetic polynucleotide
aggcaucuaauauuccuggacuu

SEQ ID NO: 2963 - RNA, 23 nt, Artificial Sequence
  synthetic polynucleotide
aggcaucuaauauuccagcacuu

SEQ ID NO: 2964 - RNA, 23 nt, Artificial Sequence
  synthetic polynucleotide
aaggcaucuaauauucgaggauu

SEQ ID NO: 2965 - RNA, 23 nt, Artificial Sequence
  synthetic polynucleotide
aaggcaucuaauauuccacgauu

SEQ ID NO: 2966 - RNA, 23 nt, Artificial Sequence
  synthetic polynucleotide
uacuucaucagaucuuaguguuu

SEQ ID NO: 2967 - RNA, 23 nt, Artificial Sequence
  synthetic polynucleotide
uacuucaucagaucuuagacuuu

SEQ ID NO: 2968 - RNA, 23 nt, Artificial Sequence
  synthetic polynucleotide
uuaggaaauccaaugcugacuuu

SEQ ID NO: 2969 - RNA, 23 nt, Artificial Sequence
  synthetic polynucleotide
uuaggaaauccaaugcuguguuu

SEQ ID NO: 2970 - RNA, 23 nt, Artificial Sequence
  synthetic polynucleotide
ugcaucuggaacaagccaucauu

SEQ ID NO: 2971 - RNA, 23 nt, Artificial Sequence
  synthetic polynucleotide
augcaucuggaacaagccaucuu

SEQ ID NO: 2972 - RNA, 23 nt, Artificial Sequence
  synthetic polynucleotide
agaaauccaaugcugucugaguu

SEQ ID NO: 2973 - RNA, 23 nt, Artificial Sequence
  synthetic polynucleotide
uaaucaaaggacaaaauggcauu

SEQ ID NO: 2974 - RNA, 23 nt, Artificial Sequence
  synthetic polynucleotide
uauaaucaaaggacaaaaugguu

SEQ ID NO: 2975 - RNA, 21 nt, Artificial Sequence
  synthetic polynucleotide
aagacgaaaaaugugaaaauc

SEQ ID NO: 2976 - RNA, 21 nt, Artificial Sequence
  synthetic polynucleotide
uuuaaaaggcaucuaauauuc

SEQ ID NO: 2977 - RNA, 21 nt, Artificial Sequence
  synthetic polynucleotide
acaacugacauaugcuuuccu

SEQ ID NO: 2978 - RNA, 21 nt, Artificial Sequence
  synthetic polynucleotide
auaaucaaaggacaaaauggc

SEQ ID NO: 2979 - RNA, 21 nt, Artificial Sequence
  synthetic polynucleotide
uaaguuauugagacuauauuu

SEQ ID NO: 2980 - RNA, 21 nt, Artificial Sequence
  synthetic polynucleotide
ugcaagucugcgcucuuggua

SEQ ID NO: 2981 - RNA, 21 nt, Artificial Sequence
  synthetic polynucleotide
agaacauuuuuaaaaggcauc

SEQ ID NO: 2982 - RNA, 21 nt, Artificial Sequence
  synthetic polynucleotide
acaucuaauauuccaggacau

SEQ ID NO: 2983 - RNA, 21 nt, Artificial Sequence
  synthetic polynucleotide
aagacgaaaaaugugaaaauu

SEQ ID NO: 2984 - RNA, 21 nt, Artificial Sequence
  synthetic polynucleotide
uuuaaaaggcaucuaauauuu

SEQ ID NO: 2985 - RNA, 21 nt, Artificial Sequence
  synthetic polynucleotide
acaacugacauaugcuuucuu

SEQ ID NO: 2986 - RNA, 21 nt, Artificial Sequence
  synthetic polynucleotide
auaaucaaaggacaaaauguu

SEQ ID NO: 2987 - RNA, 21 nt, Artificial Sequence
  synthetic polynucleotide
ugcaagucugcgcucuugguu

SEQ ID NO: 2988 - RNA, 21 nt, Artificial Sequence
  synthetic polynucleotide
agaacauuuuuaaaaggcauu

SEQ ID NO: 2989 - RNA, 21 nt, Artificial Sequence
  synthetic polynucleotide
acaucuaauauuccaggacuu

SEQ ID NO: 2990 - RNA, 21 nt, Artificial Sequence
  synthetic polynucleotide
uacuucaucagaucuuagguu

SEQ ID NO: 2991 - RNA, 23 nt, Artificial Sequence
  synthetic polynucleotide
uagauauuggguuuuaaacaacu

SEQ ID NO: 2992 - RNA, 23 nt, Artificial Sequence
  synthetic polynucleotide
uuccauauaacuuucguucugaa

SEQ ID NO: 2993 - RNA, 23 nt, Artificial Sequence
  synthetic polynucleotide
auauacuucaucagaucuuagag

SEQ ID NO: 2994 - RNA, 23 nt, Artificial Sequence
  synthetic polynucleotide
acaaagaguggugauuuuccaua

SEQ ID NO: 2995 - RNA, 21 nt, Artificial Sequence
  synthetic polynucleotide
auucaucagaucuuagaguua

SEQ ID NO: 2996 - RNA, 21 nt, Artificial Sequence
  synthetic polynucleotide
ucacugaaucacuuuucuucu

SEQ ID NO: 2997 - RNA, 23 nt, Artificial Sequence
  synthetic polynucleotide
aagacgaaaaaugugaaaaucac

SEQ ID NO: 2998 - RNA, 23 nt, Artificial Sequence
  synthetic polynucleotide
auucaucagaucuuagaguuaua

SEQ ID NO: 2999 - RNA, 23 nt, Artificial Sequence
  synthetic polynucleotide
ucacugaaucacuuuucuucucc

SEQ ID NO: 3000 - RNA, 21 nt, Artificial Sequence
  synthetic polynucleotide
auucaucagaucuuagaguuu

SEQ ID NO: 3001 - RNA, 21 nt, Artificial Sequence
  synthetic polynucleotide
ucacugaaucacuuuucuuuu

SEQ ID NO: 3002 - RNA, 23 nt, Artificial Sequence
  synthetic polynucleotide
ugcaagucugcgcucuugguaga

SEQ ID NO: 3003 - RNA, 21 nt, Artificial Sequence
  synthetic polynucleotide
agucggaacaagucugcuauu

SEQ ID NO: 3004 - RNA, 21 nt, Artificial Sequence
  synthetic polynucleotide
uccauaaucaguuaaacgggg

SEQ ID NO: 3005 - RNA, 21 nt, Artificial Sequence
  synthetic polynucleotide
acaugcuucaaguguugucau

SEQ ID NO: 3006 - RNA, 21 nt, Artificial Sequence
  synthetic polynucleotide
ucaaaggacaaaauggcaaua

SEQ ID NO: 3007 - RNA, 21 nt, Artificial Sequence
  synthetic polynucleotide
ucaucagaucuuagaguuaua

SEQ ID NO: 3008 - RNA, 21 nt, Artificial Sequence
  synthetic polynucleotide
aacauugaagcauugagacac

SEQ ID NO: 3009 - RNA, 21 nt, Artificial Sequence
  synthetic polynucleotide
uccauaaucaguuaaacgguu

SEQ ID NO: 3010 - RNA, 21 nt, Artificial Sequence
  synthetic polynucleotide
acaugcuucaaguguugucuu

SEQ ID NO: 3011 - RNA, 21 nt, Artificial Sequence
  synthetic polynucleotide
ucaaaggacaaaauggcaauu

SEQ ID NO: 3012 - RNA, 21 nt, Artificial Sequence
  synthetic polynucleotide
ucaucagaucuuagaguuauu

SEQ ID NO: 3013 - RNA, 21 nt, Artificial Sequence
  synthetic polynucleotide
aacauugaagcauugagacuu

SEQ ID NO: 3014 - RNA, 21 nt, Artificial Sequence
  synthetic polynucleotide
acauccggaacaagccaucac

SEQ ID NO: 3015 - RNA, 21 nt, Artificial Sequence
  synthetic polynucleotide
acaucugcaacaagccaucac

SEQ ID NO: 3016 - RNA, 23 nt, Artificial Sequence
  synthetic polynucleotide
uuccacauaacuuucguucugaa

SEQ ID NO: 3017 - RNA, 23 nt, Artificial Sequence
  synthetic polynucleotide
uuccauacaacuuucguucugaa

SEQ ID NO: 3018 - RNA, 23 nt, Artificial Sequence
  synthetic polynucleotide
aaucuuauauuccaggacauauu

SEQ ID NO: 3019 - RNA, 23 nt, Artificial Sequence
  synthetic polynucleotide
aaucuaacauuccaggacauauu

SEQ ID NO: 3020 - RNA, 23 nt, Artificial Sequence
  synthetic polynucleotide
acauccaauauuccaggacauuu

SEQ ID NO: 3021 - RNA, 23 nt, Artificial Sequence
  synthetic polynucleotide
acaucuauuauuccaggacauuu

SEQ ID NO: 3022 - RNA, 23 nt, Artificial Sequence
  synthetic polynucleotide
agcauuuaauauuccaggacauu

SEQ ID NO: 3023 - RNA, 23 nt, Artificial Sequence
  synthetic polynucleotide
agcaucuuauauuccaggacauu

SEQ ID NO: 3024 - RNA, 21 nt, Artificial Sequence
  synthetic polynucleotide
aggcaccuaauauuccagguu

SEQ ID NO: 3025 - RNA, 21 nt, Artificial Sequence
  synthetic polynucleotide
aggcauccaauauuccagguu

SEQ ID NO: 3026 - RNA, 21 nt, Artificial Sequence
  synthetic polynucleotide
aaggcuucuaauauuccagga

SEQ ID NO: 3027 - RNA, 21 nt, Artificial Sequence
  synthetic polynucleotide
aaggcauuuaauauuccagga

SEQ ID NO: 3028 - RNA, 23 nt, Artificial Sequence
  synthetic polynucleotide
aaagguaucuaauauuccagguu

SEQ ID NO: 3029 - RNA, 23 nt, Artificial Sequence
  synthetic polynucleotide
aaaggcaccuaauauuccagguu

SEQ ID NO: 3030 - RNA, 23 nt, Artificial Sequence
  synthetic polynucleotide
aaaagccaucuaauauuccaguu

SEQ ID NO: 3031 - RNA, 23 nt, Artificial Sequence
  synthetic polynucleotide
aaaaggcuucuaauauuccaguu

SEQ ID NO: 3032 - RNA, 23 nt, Artificial Sequence
  synthetic polynucleotide
uuuaauaggcaucuaauauucuu

SEQ ID NO: 3033 - RNA, 23 nt, Artificial Sequence
  synthetic polynucleotide
uuuaaaacgcaucuaauauucuu

SEQ ID NO: 3034 - RNA, 23 nt, Artificial Sequence
  synthetic polynucleotide
agaacuuuuuuaaaaggcaucuu

SEQ ID NO: 3035 - RNA, 23 nt, Artificial Sequence
  synthetic polynucleotide
agaacaucuuuaaaaggcaucuu

SEQ ID NO: 3036 - RNA, 23 nt, Artificial Sequence
  synthetic polynucleotide
aagaccaaaaaugugaaaaucuu

SEQ ID NO: 3037 - RNA, 23 nt, Artificial Sequence
  synthetic polynucleotide
aagacgauaaaugugaaaaucuu

SEQ ID NO: 3038 - RNA, 23 nt, Artificial Sequence
  synthetic polynucleotide
augggucauugaagcauugaguu

SEQ ID NO: 3039 - RNA, 23 nt, Artificial Sequence
  synthetic polynucleotide
augggacuuugaagcauugaguu

SEQ ID NO: 3040 - RNA, 21 nt, Artificial Sequence
  synthetic polynucleotide
aacugcgacauugaagcauug

SEQ ID NO: 3041 - RNA, 21 nt, Artificial Sequence
  synthetic polynucleotide
aacugggucauugaagcauug

SEQ ID NO: 3042 - RNA, 23 nt, Artificial Sequence
  synthetic polynucleotide
uaagucauugagacuauauuuuu

SEQ ID NO: 3043 - RNA, 23 nt, Artificial Sequence
  synthetic polynucleotide
uaaguuacugagacuauauuuuu

SEQ ID NO: 3044 - RNA, 23 nt, Artificial Sequence
  synthetic polynucleotide
agggacuuuucagaauccugcuu

SEQ ID NO: 3045 - RNA, 23 nt, Artificial Sequence
  synthetic polynucleotide
agggagucuucagaauccugcuu

SEQ ID NO: 3046 - RNA, 23 nt, Artificial Sequence
  synthetic polynucleotide
ugcaacucugcgcucuugguauu

SEQ ID NO: 3047 - RNA, 23 nt, Artificial Sequence
  synthetic polynucleotide
ugcaaguuugcgcucuugguauu

SEQ ID NO: 3048 - RNA, 23 nt, Artificial Sequence
  synthetic polynucleotide
acaaccgacauaugcuuuccuuu

SEQ ID NO: 3049 - RNA, 23 nt, Artificial Sequence
  synthetic polynucleotide
acaacugucauaugcuuuccuuu

SEQ ID NO: 3050 - RNA, 21 nt, Artificial Sequence
  synthetic polynucleotide
uagauuuuggguuuuaaacuu

SEQ ID NO: 3051 - RNA, 21 nt, Artificial Sequence
  synthetic polynucleotide
uagauaucggguuuuaaacuu

SEQ ID NO: 3052 - RNA, 23 nt, Artificial Sequence
  synthetic polynucleotide
uagagcuauacaaucaguuaauu

SEQ ID NO: 3053 - RNA, 23 nt, Artificial Sequence
  synthetic polynucleotide
uagaguuuuacaaucaguuaauu

SEQ ID NO: 3054 - RNA, 21 nt, Artificial Sequence
  synthetic polynucleotide
auucaccagaucuuagaguua

SEQ ID NO: 3055 - RNA, 21 nt, Artificial Sequence
  synthetic polynucleotide
auucaucugaucuuagaguua

SEQ ID NO: 3056 - RNA, 23 nt, Artificial Sequence
  synthetic polynucleotide
uacuuuaucagaucuuagaguuu

SEQ ID NO: 3057 - RNA, 23 nt, Artificial Sequence
  synthetic polynucleotide
uacuucaccagaucuuagaguuu

SEQ ID NO: 3058 - RNA, 23 nt, Artificial Sequence
  synthetic polynucleotide
ucaaacgacaaaauggcaauauu

SEQ ID NO: 3059 - RNA, 23 nt, Artificial Sequence
  synthetic polynucleotide
ucaaaggucaaaauggcaauauu

SEQ ID NO: 3060 - RNA, 23 nt, Artificial Sequence
  synthetic polynucleotide
auaauuaaaggacaaaauggcuu

SEQ ID NO: 3061 - RNA, 23 nt, Artificial Sequence
  synthetic polynucleotide
auaaucauaggacaaaauggcuu

SEQ ID NO: 3062 - RNA, 20 nt, Artificial Sequence
  synthetic polynucleotide
  misc_feature (1)..(20): combination of 2'-fluoro, 2'-O-methyl, inverted abasic, phosphorothioate linked ribonucleotides
guauguccuggaauauuaga

SEQ ID NO: 3063 - RNA, 20 nt, Artificial Sequence
  synthetic polynucleotide
  misc_feature (1)..(20): combination of 2'-fluoro, 2'-O-methyl, inverted abasic, phosphorothioate linked ribonucleotides
aggcuagagaagaaaguuaa

SEQ ID NO: 3064 - RNA, 20 nt, Artificial Sequence
  synthetic polynucleotide
  misc_feature (1)..(20): combination of 2'-fluoro, 2'-O-methyl, inverted abasic, phosphorothioate linked ribonucleotides
uguauaacucuaagaucuga

SEQ ID NO: 3065 - RNA, 20 nt, Artificial Sequence
  synthetic polynucleotide
  misc_feature (1)..(20): combination of 2'-fluoro, 2'-O-methyl, inverted abasic, phosphorothioate linked ribonucleotides
ccguauguccuggaauauua

SEQ ID NO: 3066 - RNA, 20 nt, Artificial Sequence
  synthetic polynucleotide
  misc_feature (1)..(20): combination of 2'-fluoro, 2'-O-methyl, inverted abasic, phosphorothioate linked ribonucleotides
caaaaaugacaacacuugaa

SEQ ID NO: 3067 - RNA, 20 nt, Artificial Sequence
  synthetic polynucleotide
  misc_feature (1)..(20): combination of 2'-fluoro, 2'-O-methyl, inverted abasic, phosphorothioate linked ribonucleotides
uacugaaaaccuuuaaaggg

SEQ ID NO: 3068 - RNA, 20 nt, Artificial Sequence
  synthetic polynucleotide
  misc_feature (1)..(20): combination of 2'-fluoro, 2'-O-methyl, inverted abasic, phosphorothioate linked ribonucleotides
acuacugaaaaccuuuaaag

SEQ ID NO: 3069 - RNA, 20 nt, Artificial Sequence
  synthetic polynucleotide
  misc_feature (1)..(20): combination of 2'-fluoro, 2'-O-methyl, inverted abasic, phosphorothioate linked ribonucleotides
agaagaaaagugauucagug

SEQ ID NO: 3070 - RNA, 20 nt, Artificial Sequence
  synthetic polynucleotide
  misc_feature (1)..(20): combination of 2'-fluoro, 2'-O-methyl, inverted abasic, phosphorothioate linked ribonucleotides
uuugggcaguauuuugugcu

SEQ ID NO: 3071 - RNA, 20 nt, Artificial Sequence
  synthetic polynucleotide
  misc_feature (1)..(20): combination of 2'-fluoro, 2'-O-methyl, inverted abasic, phosphorothioate linked ribonucleotides
uaccaagagcgcagacuugc

SEQ ID NO: 3072 - RNA, 20 nt, Artificial Sequence
  synthetic polynucleotide
  misc_feature (1)..(20): combination of 2'-fluoro, 2'-O-methyl, inverted abasic, phosphorothioate linked ribonucleotides
cgggcuagcuuuugaaaugg

SEQ ID NO: 3073 - RNA, 20 nt, Artificial Sequence
  synthetic polynucleotide
  misc_feature (1)..(20): combination of 2'-fluoro, 2'-O-methyl, inverted abasic, phosphorothioate linked ribonucleotides
cuggaaacacugaagaguua

SEQ ID NO: 3074 - RNA, 20 nt, Artificial Sequence
  synthetic polynucleotide
  misc_feature (1)..(20): combination of 2'-fluoro, 2'-O-methyl, inverted abasic, phosphorothioate linked ribonucleotides
augucccagugcaaaaagua

SEQ ID NO: 3075 - RNA, 20 nt, Artificial Sequence
  synthetic polynucleotide
  misc_feature (1)..(20): combination of 2'-fluoro, 2'-O-methyl, inverted abasic, phosphorothioate linked ribonucleotides
cuggaauauuagaugccuuu

SEQ ID NO: 3076 - RNA, 20 nt, Artificial Sequence
  synthetic polynucleotide
  misc_feature (1)..(20): combination of 2'-fluoro, 2'-O-methyl, inverted abasic, phosphorothioate linked ribonucleotides
ccuggaauauuagaugccuu

SEQ ID NO: 3077 - RNA, 20 nt, Artificial Sequence
  synthetic polynucleotide
  misc_feature (1)..(20): combination of 2'-fluoro, 2'-O-methyl, inverted abasic, phosphorothioate linked ribonucleotides
uccuggaauauuagaugccu

SEQ ID NO: 3078 - RNA, 20 nt, Artificial Sequence
  synthetic polynucleotide
  misc_feature (1)..(20): combination of 2'-fluoro, 2'-O-methyl, inverted abasic, phosphorothioate linked ribonucleotides
acucuaagaucugaugaagu

SEQ ID NO: 3079 - RNA, 20 nt, Artificial Sequence
  synthetic polynucleotide
  misc_feature (1)..(20): combination of 2'-fluoro, 2'-O-methyl, inverted abasic, phosphorothioate linked ribonucleotides
guccuggaauauuagaugcc

SEQ ID NO: 3080 - RNA, 20 nt, Artificial Sequence
  synthetic polynucleotide
  misc_feature (1)..(20): combination of 2'-fluoro, 2'-O-methyl, inverted abasic, phosphorothioate linked ribonucleotides
uguccuggaauauuagaugc

SEQ ID NO: 3081 - RNA, 20 nt, Artificial Sequence
  synthetic polynucleotide
  misc_feature (1)..(20): combination of 2'-fluoro, 2'-O-methyl, inverted abasic, phosphorothioate linked ribonucleotides
uaacucuaagaucugaugaa

SEQ ID NO: 3082 - RNA, 20 nt, Artificial Sequence
  synthetic polynucleotide
  misc_feature (1)..(20): combination of 2'-fluoro, 2'-O-methyl, inverted abasic, phosphorothioate linked ribonucleotides
gugauggcuuguuccagaug

SEQ ID NO: 3083 - RNA, 20 nt, Artificial Sequence
  synthetic polynucleotide
  misc_feature (1)..(20): combination of 2'-fluoro, 2'-O-methyl, inverted abasic, phosphorothioate linked ribonucleotides
gucuaugcagaggauucuug

SEQ ID NO: 3084 - RNA, 20 nt, Artificial Sequence
  synthetic polynucleotide
  misc_feature (1)..(20): combination of 2'-fluoro, 2'-O-methyl, inverted abasic, phosphorothioate linked ribonucleotides
acccugacucucagugcagc

SEQ ID NO: 3085 - RNA, 20 nt, Artificial Sequence
  synthetic polynucleotide
  misc_feature (1)..(20): combination of 2'-fluoro, 2'-O-methyl, inverted abasic, phosphorothioate linked ribonucleotides
agccuacacaaaggaccuac

SEQ ID NO: 3086 - RNA, 20 nt, Artificial Sequence
  synthetic polynucleotide
  misc_feature (1)..(20): combination of 2'-fluoro, 2'-O-methyl, inverted abasic, phosphorothioate linked ribonucleotides
accaagagcgcagacuugca

SEQ ID NO: 3087 - RNA, 20 nt, Artificial Sequence
  synthetic polynucleotide
  misc_feature (1)..(20): combination of 2'-fluoro, 2'-O-methyl, inverted abasic, phosphorothioate linked ribonucleotides
gaaggaaccgcuggaaacac

SEQ ID NO: 3088 - RNA, 20 nt, Artificial Sequence
  synthetic polynucleotide
  misc_feature (1)..(20): combination of 2'-fluoro, 2'-O-methyl, inverted abasic, phosphorothioate linked ribonucleotides
uucccuuuucuucucaagcc

SEQ ID NO: 3089 - RNA, 20 nt, Artificial Sequence
  synthetic polynucleotide
  misc_feature (1)..(20): combination of 2'-fluoro, 2'-O-methyl, inverted abasic, phosphorothioate linked ribonucleotides
ccugucacuaccacucguua

SEQ ID NO: 3090 - RNA, 20 nt, Artificial Sequence
  synthetic polynucleotide
  misc_feature (1)..(20): combination of 2'-fluoro, 2'-O-methyl, inverted abasic, phosphorothioate linked ribonucleotides
cgcgcuuuguccuccucgcg

SEQ ID NO: 3091 - RNA, 20 nt, Artificial Sequence
  synthetic polynucleotide
  misc_feature (1)..(20): combination of 2'-fluoro, 2'-O-methyl, inverted abasic, phosphorothioate linked ribonucleotides
gaaacaugguuacugcucgc

SEQ ID NO: 3092 - RNA, 20 nt, Artificial Sequence
  synthetic polynucleotide
  misc_feature (1)..(20): combination of 2'-fluoro, 2'-O-methyl, inverted abasic, phosphorothioate linked ribonucleotides
cuuuguccuccucgcgcaau

SEQ ID NO: 3093 - RNA, 20 nt, Artificial Sequence
  synthetic polynucleotide
  misc_feature (1)..(20): combination of 2'-fluoro, 2'-O-methyl, inverted abasic, phosphorothioate linked ribonucleotides
gcauaaagacugaggugacc

SEQ ID NO: 3094 - RNA, 20 nt, Artificial Sequence
  synthetic polynucleotide
  misc_feature (1)..(20): combination of 2'-fluoro, 2'-O-methyl, inverted abasic, phosphorothioate linked ribonucleotides
uuuguccuccucgcgcaauc

SEQ ID NO: 3095 - RNA, 20 nt, Artificial Sequence
  synthetic polynucleotide
  misc_feature (1)..(20): combination of 2'-fluoro, 2'-O-methyl, inverted abasic, phosphorothioate linked ribonucleotides
gaaaagggugauggcuuguu

SEQ ID NO: 3096 - RNA, 20 nt, Artificial Sequence
  synthetic polynucleotide
  misc_feature (1)..(20): combination of 2'-fluoro, 2'-O-methyl, inverted abasic, phosphorothioate linked ribonucleotides
aaaagggugauggcuuguuc

SEQ ID NO: 3097 - RNA, 20 nt, Artificial Sequence
  synthetic polynucleotide
  misc_feature (1)..(20): combination of 2'-fluoro, 2'-O-methyl, inverted abasic, phosphorothioate linked ribonucleotides
cuacugccuaucaaaacgcc

SEQ ID NO: 3098 - RNA, 20 nt, Artificial Sequence
  synthetic polynucleotide
  misc_feature (1)..(20): combination of 2'-fluoro, 2'-O-methyl, inverted abasic, phosphorothioate linked ribonucleotides
cucaucaaauagcagacuug

SEQ ID NO: 3099 - RNA, 20 nt, Artificial Sequence
  synthetic polynucleotide
  misc_feature (1)..(20): combination of 2'-fluoro, 2'-O-methyl, inverted abasic, phosphorothioate linked ribonucleotides
agacaccagcccauucuuga

SEQ ID NO: 3100 - RNA, 20 nt, Artificial Sequence
  synthetic polynucleotide
  misc_feature (1)..(20): combination of 2'-fluoro, 2'-O-methyl, inverted abasic, phosphorothioate linked ribonucleotides
cagcccauucuugauccuuu

SEQ ID NO: 3101 - RNA, 20 nt, Artificial Sequence
  synthetic polynucleotide
  misc_feature (1)..(20): combination of 2'-fluoro, 2'-O-methyl, inverted abasic, phosphorothioate linked ribonucleotides
gcagaggauucuugggauga

SEQ ID NO: 3102 - RNA, 20 nt, Artificial Sequence
  synthetic polynucleotide
  misc_feature (1)..(20): combination of 2'-fluoro, 2'-O-methyl, inverted abasic, phosphorothioate linked ribonucleotides
cuaaaggugcucaggaggau

SEQ ID NO: 3103 - RNA, 20 nt, Artificial Sequence
  synthetic polynucleotide
  misc_feature (1)..(20): combination of 2'-fluoro, 2'-O-methyl, inverted abasic, phosphorothioate linked ribonucleotides
aaagcauaugucaguuguuu

SEQ ID NO: 3104 - RNA, 20 nt, Artificial Sequence
  synthetic polynucleotide
  misc_feature (1)..(20): combination of 2'-fluoro, 2'-O-methyl, inverted abasic, phosphorothioate linked ribonucleotides
uuaacugauuguauaacucu

SEQ ID NO: 3105 - RNA, 20 nt, Artificial Sequence
  synthetic polynucleotide
  misc_feature (1)..(20): combination of 2'-fluoro, 2'-O-methyl, inverted abasic, phosphorothioate linked ribonucleotides
uaacugauuguauaacucua

SEQ ID NO: 3106 - RNA, 20 nt, Artificial Sequence
  synthetic polynucleotide
  misc_feature (1)..(20): combination of 2'-fluoro, 2'-O-methyl, inverted abasic, phosphorothioate linked ribonucleotides
ugaaaacuccccguuuaacu

SEQ ID NO: 3107 - RNA, 20 nt, Artificial Sequence
  synthetic polynucleotide
  misc_feature (1)..(20): combination of 2'-fluoro, 2'-O-methyl, inverted abasic, phosphorothioate linked ribonucleotides
gaugccuuuuaaaaauguuc

SEQ ID NO: 3108 - RNA, 20 nt, Artificial Sequence
  synthetic polynucleotide
  misc_feature (1)..(20): combination of 2'-fluoro, 2'-O-methyl, inverted abasic, phosphorothioate linked ribonucleotides
aaguugacuaaacuugaaaa

SEQ ID NO: 3109 - RNA, 20 nt, Artificial Sequence
  synthetic polynucleotide
  misc_feature (1)..(20): combination of 2'-fluoro, 2'-O-methyl, inverted abasic, phosphorothioate linked ribonucleotides
cacaaaggaccuacuacugc

SEQ ID NO: 3110 - RNA, 20 nt, Artificial Sequence
  synthetic polynucleotide
  misc_feature (1)..(20): combination of 2'-fluoro, 2'-O-methyl, inverted abasic, phosphorothioate linked ribonucleotides
gauuuucacauuuuucgucu

SEQ ID NO: 3111 - RNA, 20 nt, Artificial Sequence
  synthetic polynucleotide
  misc_feature (1)..(20): combination of 2'-fluoro, 2'-O-methyl, inverted abasic, phosphorothioate linked ribonucleotides
ccauucuugauccuuucuga

SEQ ID NO: 3112 - RNA, 20 nt, Artificial Sequence
  synthetic polynucleotide
  misc_feature (1)..(20): combination of 2'-fluoro, 2'-O-methyl, inverted abasic, phosphorothioate linked ribonucleotides
gaauauuagaugccuuuuaa

SEQ ID NO: 3113 - RNA, 20 nt, Artificial Sequence
  synthetic polynucleotide
  misc_feature (1)..(20): combination of 2'-fluoro, 2'-O-methyl, inverted abasic, phosphorothioate linked ribonucleotides
aaggaaagcauaugucaguu

SEQ ID NO: 3114 - RNA, 20 nt, Artificial Sequence
  synthetic polynucleotide
  misc_feature (1)..(20): combination of 2'-fluoro, 2'-O-methyl, inverted abasic, phosphorothioate linked ribonucleotides
aggaaagcauaugucaguug

SEQ ID NO: 3115 - RNA, 20 nt, Artificial Sequence
  synthetic polynucleotide
  misc_feature (1)..(20): combination of 2'-fluoro, 2'-O-methyl, inverted abasic, phosphorothioate linked ribonucleotides
ccccguuuaacugauuaugg

SEQ ID NO: 3116 - RNA, 20 nt, Artificial Sequence
  synthetic polynucleotide
  misc_feature (1)..(20): combination of 2'-fluoro, 2'-O-methyl, inverted abasic, phosphorothioate linked ribonucleotides
ggaaagcauaugucaguugu

SEQ ID NO: 3117 - RNA, 20 nt, Artificial Sequence
  synthetic polynucleotide
  misc_feature (1)..(20): combination of 2'-fluoro, 2'-O-methyl, inverted abasic, phosphorothioate linked ribonucleotides
gccauuuuguccuuugauua

SEQ ID NO: 3118 - RNA, 20 nt, Artificial Sequence
  synthetic polynucleotide
  misc_feature (1)..(20): combination of 2'-fluoro, 2'-O-methyl, inverted abasic, phosphorothioate linked ribonucleotides
augacaacacuugaagcaug

SEQ ID NO: 3119 - RNA, 20 nt, Artificial Sequence
  synthetic polynucleotide
  misc_feature (1)..(20): combination of 2'-fluoro, 2'-O-methyl, inverted abasic, phosphorothioate linked ribonucleotides
cuccugcuucuccguuuauc

SEQ ID NO: 3120 - RNA, 20 nt, Artificial Sequence
  synthetic polynucleotide
  misc_feature (1)..(20): combination of 2'-fluoro, 2'-O-methyl, inverted abasic, phosphorothioate linked ribonucleotides
cagacuugcauccugucacu

SEQ ID NO: 3121 - RNA, 20 nt, Artificial Sequence
  synthetic polynucleotide
  misc_feature (1)..(20): combination of 2'-fluoro, 2'-O-methyl, inverted abasic, phosphorothioate linked ribonucleotides
gagggaaacaugguuacugc

SEQ ID NO: 3122 - RNA, 20 nt, Artificial Sequence
  synthetic polynucleotide
  misc_feature (1)..(20): combination of 2'-fluoro, 2'-O-methyl, inverted abasic, phosphorothioate linked ribonucleotides
uggcauaaagacugagguga

SEQ ID NO: 3123 - RNA, 20 nt, Artificial Sequence
  synthetic polynucleotide
  misc_feature (1)..(20): combination of 2'-fluoro, 2'-O-methyl, inverted abasic, phosphorothioate linked ribonucleotides
uccuagaauguguuauugcc

SEQ ID NO: 3124 - RNA, 20 nt, Artificial Sequence
  synthetic polynucleotide
  misc_feature (1)..(20): combination of 2'-fluoro, 2'-O-methyl, inverted abasic, phosphorothioate linked ribonucleotides
uggaaacacugaagaguuau

SEQ ID NO: 3125 - RNA, 20 nt, Artificial Sequence
  synthetic polynucleotide
  misc_feature (1)..(20): combination of 2'-fluoro, 2'-O-methyl, inverted abasic, phosphorothioate linked ribonucleotides
uggauuuccuaaaggugcuc

SEQ ID NO: 3126 - RNA, 20 nt, Artificial Sequence
  synthetic polynucleotide
  misc_feature (1)..(20): combination of 2'-fluoro, 2'-O-methyl, inverted abasic, phosphorothioate linked ribonucleotides
gaggagaagaaaagugauuc

SEQ ID NO: 3127 - RNA, 20 nt, Artificial Sequence
  synthetic polynucleotide
  misc_feature (1)..(20): combination of 2'-fluoro, 2'-O-methyl, inverted abasic, phosphorothioate linked ribonucleotides
accuacuacugccuaucaaa

SEQ ID NO: 3128 - RNA, 20 nt, Artificial Sequence
  synthetic polynucleotide
  misc_feature (1)..(20): combination of 2'-fluoro, 2'-O-methyl, inverted abasic, phosphorothioate linked ribonucleotides
uacuacugccuaucaaaacg

SEQ ID NO: 3129 - RNA, 20 nt, Artificial Sequence
  synthetic polynucleotide
  misc_feature (1)..(20): combination of 2'-fluoro, 2'-O-methyl, inverted abasic, phosphorothioate linked ribonucleotides
aaauauagucucaauaacuu

SEQ ID NO: 3130 - RNA, 20 nt, Artificial Sequence
  synthetic polynucleotide
  misc_feature (1)..(20): combination of 2'-fluoro, 2'-O-methyl, inverted abasic, phosphorothioate linked ribonucleotides
aacucuaagaucugaugaag

SEQ ID NO: 3131 - RNA, 20 nt, Artificial Sequence
  synthetic polynucleotide
  misc_feature (1)..(20): combination of 2'-fluoro, 2'-O-methyl, inverted abasic, phosphorothioate linked ribonucleotides
aagaguuaucgccaguguga

SEQ ID NO: 3132 - RNA, 20 nt, Artificial Sequence
  synthetic polynucleotide
  misc_feature (1)..(20): combination of 2'-fluoro, 2'-O-methyl, inverted abasic, phosphorothioate linked ribonucleotides
ccgggcuagcuuuugaaaug

SEQ ID NO: 3133 - RNA, 20 nt, Artificial Sequence
  synthetic polynucleotide
  misc_feature (1)..(20): combination of 2'-fluoro, 2'-O-methyl, inverted abasic, phosphorothioate linked ribonucleotides
guuauauggaaaaucaccac

SEQ ID NO: 3134 - RNA, 20 nt, Artificial Sequence
  synthetic polynucleotide
  misc_feature (1)..(20): combination of 2'-fluoro, 2'-O-methyl, inverted abasic, phosphorothioate linked ribonucleotides
aaagugauucagugauuuca

SEQ ID NO: 3135 - RNA, 20 nt, Artificial Sequence
  synthetic polynucleotide
  misc_feature (1)..(20): combination of 2'-fluoro, 2'-O-methyl, inverted abasic, phosphorothioate linked ribonucleotides
uauguccuggaauauuagau

SEQ ID NO: 3136 - RNA, 20 nt, Artificial Sequence
  synthetic polynucleotide
  misc_feature (1)..(20): combination of 2'-fluoro, 2'-O-methyl, inverted abasic, phosphorothioate linked ribonucleotides
auaacucuaagaucugauga

SEQ ID NO: 3137 - RNA, 20 nt, Artificial Sequence
  synthetic polynucleotide
  misc_feature (1)..(20): combination of 2'-fluoro, 2'-O-methyl, inverted abasic, phosphorothioate linked ribonucleotides
cuuguuccagaugcauuuua

SEQ ID NO: 3138 - RNA, 20 nt, Artificial Sequence
  synthetic polynucleotide
  misc_feature (1)..(20): combination of 2'-fluoro, 2'-O-methyl, inverted abasic, phosphorothioate linked ribonucleotides
uauugccauuuuguccuuug

SEQ ID NO: 3139 - RNA, 20 nt, Artificial Sequence
  synthetic polynucleotide
  misc_feature (1)..(20): combination of 2'-fluoro, 2'-O-methyl, inverted abasic, phosphorothioate linked ribonucleotides
ugauuuucacauuuuucguc

SEQ ID NO: 3140 - RNA, 20 nt, Artificial Sequence
  synthetic polynucleotide
  misc_feature (1)..(20): combination of 2'-fluoro, 2'-O-methyl, inverted abasic, phosphorothioate linked ribonucleotides
caagagcgcagacuugcauc

SEQ ID NO: 3141 - RNA, 20 nt, Artificial Sequence
  synthetic polynucleotide
  misc_feature (1)..(20): combination of 2'-fluoro, 2'-O-methyl, inverted abasic, phosphorothioate linked ribonucleotides
cagauagacuacugaaaacc

SEQ ID NO: 3142 - RNA, 20 nt, Artificial Sequence
  synthetic polynucleotide
  misc_feature (1)..(20): combination of 2'-fluoro, 2'-O-methyl, inverted abasic, phosphorothioate linked ribonucleotides
uuauggaauaguucuuucuc

SEQ ID NO: 3143 - RNA, 20 nt, Artificial Sequence
  synthetic polynucleotide
  misc_feature (1)..(20): combination of 2'-fluoro, 2'-O-methyl, inverted abasic, phosphorothioate linked ribonucleotides
caugguguuucagaacugag

SEQ ID NO: 3144 - RNA, 20 nt, Artificial Sequence
  synthetic polynucleotide
  misc_feature (1)..(20): combination of 2'-fluoro, 2'-O-methyl, inverted abasic, phosphorothioate linked ribonucleotides
gaagaaaagugauucaguga

SEQ ID NO: 3145 - RNA, 20 nt, Artificial Sequence
  synthetic polynucleotide
  misc_feature (1)..(20): combination of 2'-fluoro, 2'-O-methyl, inverted abasic, phosphorothioate linked ribonucleotides
gucccagugcaaaaaguaaa

SEQ ID NO: 3146 - RNA, 20 nt, Artificial Sequence
  synthetic polynucleotide
  misc_feature (1)..(20): combination of 2'-fluoro, 2'-O-methyl, inverted abasic, phosphorothioate linked ribonucleotides
acugauuguauaacucuaag

SEQ ID NO: 3147 - RNA, 20 nt, Artificial Sequence
  synthetic polynucleotide
  misc_feature (1)..(20): combination of 2'-fluoro, 2'-O-methyl, inverted abasic, phosphorothioate linked ribonucleotides
accguauguccuggaauauu

SEQ ID NO: 3148 - RNA, 20 nt, Artificial Sequence
  synthetic polynucleotide
  misc_feature (1)..(20): combination of 2'-fluoro, 2'-O-methyl, inverted abasic, phosphorothioate linked ribonucleotides
uccccguuuaacugauuaug

SEQ ID NO: 3149 - RNA, 20 nt, Artificial Sequence
  synthetic polynucleotide
  misc_feature (1)..(20): combination of 2'-fluoro, 2'-O-methyl, inverted abasic, phosphorothioate linked ribonucleotides
auauagucucaauaacuuag

SEQ ID NO: 3150 - RNA, 20 nt, Artificial Sequence
  synthetic polynucleotide
  misc_feature (1)..(20): combination of 2'-fluoro, 2'-O-methyl, inverted abasic, phosphorothioate linked ribonucleotides
ucccagugcaaaaaguaaag

SEQ ID NO: 3151 - RNA, 20 nt, Artificial Sequence
  synthetic polynucleotide
  misc_feature (1)..(20): combination of 2'-fluoro, 2'-O-methyl, inverted abasic, phosphorothioate linked ribonucleotides
augcuucaaugucccaguuu

SEQ ID NO: 3152 - RNA, 20 nt, Artificial Sequence
  synthetic polynucleotide
  misc_feature (1)..(20): combination of 2'-fluoro, 2'-O-methyl, inverted abasic, phosphorothioate linked ribonucleotides
gaacgaaaguuauauggaau

SEQ ID NO: 3153 - RNA, 20 nt, Artificial Sequence
  synthetic polynucleotide
  misc_feature (1)..(20): combination of 2'-fluoro, 2'-O-methyl, inverted abasic, phosphorothioate linked ribonucleotides
gauugcuuacucagacacuu

SEQ ID NO: 3154 - RNA, 20 nt, Artificial Sequence
  synthetic polynucleotide
  misc_feature (1)..(20): combination of 2'-fluoro, 2'-O-methyl, inverted abasic, phosphorothioate linked ribonucleotides
cuucaggcccaauauuguaa

SEQ ID NO: 3155 - RNA, 20 nt, Artificial Sequence
  synthetic polynucleotide
  misc_feature (1)..(20): combination of 2'-fluoro, 2'-O-methyl, inverted abasic, phosphorothioate linked ribonucleotides
caaugcuucaaugucccagu

SEQ ID NO: 3156 - RNA, 20 nt, Artificial Sequence
  synthetic polynucleotide
  misc_feature (1)..(20): combination of 2'-fluoro, 2'-O-methyl, inverted abasic, phosphorothioate linked ribonucleotides
cagaacgaaaguuauaugga

SEQ ID NO: 3157 - RNA, 20 nt, Artificial Sequence
  synthetic polynucleotide
  misc_feature (1)..(20): combination of 2'-fluoro, 2'-O-methyl, inverted abasic, phosphorothioate linked ribonucleotides
ggaaguugacuaaacuugaa

SEQ ID NO: 3158 - RNA, 20 nt, Artificial Sequence
  synthetic polynucleotide
  misc_feature (1)..(20): combination of 2'-fluoro, 2'-O-methyl, inverted abasic, phosphorothioate linked ribonucleotides
ccaguggauaaccagcuucc

SEQ ID NO: 3159 - RNA, 20 nt, Artificial Sequence
  synthetic polynucleotide
  misc_feature (1)..(20): combination of 2'-fluoro, 2'-O-methyl, inverted abasic, phosphorothioate linked ribonucleotides
cuaagaucugaugaaguaua

SEQ ID NO: 3160 - RNA, 20 nt, Artificial Sequence
  synthetic polynucleotide
  misc_feature (1)..(20): combination of 2'-fluoro, 2'-O-methyl, inverted abasic, phosphorothioate linked ribonucleotides
cagauugcuuacucagacac

SEQ ID NO: 3161 - RNA, 20 nt, Artificial Sequence
  synthetic polynucleotide
  misc_feature (1)..(20): combination of 2'-fluoro, 2'-O-methyl, inverted abasic, phosphorothioate linked ribonucleotides
caaugcuucaaugucccagu

SEQ ID NO: 3162 - RNA, 20 nt, Artificial Sequence
  synthetic polynucleotide
  misc_feature (1)..(20): combination of 2'-fluoro, 2'-O-methyl, inverted abasic, phosphorothioate linked ribonucleotides
caaugcuucaaugucccauu

SEQ ID NO: 3163 - RNA, 20 nt, Artificial Sequence
  synthetic polynucleotide
  misc_feature (1)..(20): combination of 2'-fluoro, 2'-O-methyl, inverted abasic, phosphorothioate linked ribonucleotides
guuuaaaacccaauaucuau

SEQ ID NO: 3164 - RNA, 20 nt, Artificial Sequence
  synthetic polynucleotide
  misc_feature (1)..(20): combination of 2'-fluoro, 2'-O-methyl, inverted abasic, phosphorothioate linked ribonucleotides
cuucaaugucccagugcaau

SEQ ID NO: 3165 - RNA, 20 nt, Artificial Sequence
  synthetic polynucleotide
  misc_feature (1)..(20): combination of 2'-fluoro, 2'-O-methyl, inverted abasic, phosphorothioate linked ribonucleotides
agacagcauuggauuuccuu

SEQ ID NO: 3166 - RNA, 20 nt, Artificial Sequence
  synthetic polynucleotide
  misc_feature (1)..(20): combination of 2'-fluoro, 2'-O-methyl, inverted abasic, phosphorothioate linked ribonucleotides
gaaaaucaccacucuuuguu

SEQ ID NO: 3167 - RNA, 20 nt, Artificial Sequence
  synthetic polynucleotide
  misc_feature (1)..(20): combination of 2'-fluoro, 2'-O-methyl, inverted abasic, phosphorothioate linked ribonucleotides
acagcauuggauuuccuaau

SEQ ID NO: 3168 - RNA, 20 nt, Artificial Sequence
  synthetic polynucleotide
  misc_feature (1)..(20): combination of 2'-fluoro, 2'-O-methyl, inverted abasic, phosphorothioate linked ribonucleotides
aggauucugaaaacucccuu

SEQ ID NO: 3169 - RNA, 20 nt, Artificial Sequence
  synthetic polynucleotide
  misc_feature (1)..(20): combination of 2'-fluoro, 2'-O-methyl, inverted abasic, phosphorothioate linked ribonucleotides
caacacuugaagcaugguuu

SEQ ID NO: 3170 - RNA, 20 nt, Artificial Sequence
  synthetic polynucleotide
  misc_feature (1)..(20): combination of 2'-fluoro, 2'-O-methyl, inverted abasic, phosphorothioate linked ribonucleotides
cucaaugcuucaauguccca

SEQ ID NO: 3171 - RNA, 20 nt, Artificial Sequence
  synthetic polynucleotide
  misc_feature (1)..(20): combination of 2'-fluoro, 2'-O-methyl, inverted abasic, phosphorothioate linked ribonucleotides
uuguuuaaaacccaauaucu

SEQ ID NO: 3172 - RNA, 20 nt, Artificial Sequence
  synthetic polynucleotide
  misc_feature (1)..(20): combination of 2'-fluoro, 2'-O-methyl, inverted abasic, phosphorothioate linked ribonucleotides
ugcuucaaugucccagugca

SEQ ID NO: 3173 - RNA, 20 nt, Artificial Sequence
  synthetic polynucleotide
  misc_feature (1)..(20): combination of 2'-fluoro, 2'-O-methyl, inverted abasic, phosphorothioate linked ribonucleotides
ucagacagcauuggauuucc

SEQ ID NO: 3174 - RNA, 20 nt, Artificial Sequence
  synthetic polynucleotide
  misc_feature (1)..(20): combination of 2'-fluoro, 2'-O-methyl, inverted abasic, phosphorothioate linked ribonucleotides
uggaaaaucaccacucuuug

SEQ ID NO: 3175 - RNA, 20 nt, Artificial Sequence
  synthetic polynucleotide
  misc_feature (1)..(20): combination of 2'-fluoro, 2'-O-methyl, inverted abasic, phosphorothioate linked ribonucleotides
agacagcauuggauuuccua

SEQ ID NO: 3176 - RNA, 20 nt, Artificial Sequence
  synthetic polynucleotide
  misc_feature (1)..(20): combination of 2'-fluoro, 2'-O-methyl, inverted abasic, phosphorothioate linked ribonucleotides
acaggauucugaaaacuccc

SEQ ID NO: 3177 - RNA, 20 nt, Artificial Sequence
  synthetic polynucleotide
  misc_feature (1)..(20): combination of 2'-fluoro, 2'-O-methyl, inverted abasic, phosphorothioate linked ribonucleotides
gacaacacuugaagcauggu

SEQ ID NO: 3178 - RNA, 20 nt, Artificial Sequence
  synthetic polynucleotide
  misc_feature (1)..(20): combination of 2'-fluoro, 2'-O-methyl, inverted abasic, phosphorothioate linked ribonucleotides
cuguuuaaaacccaauaucu

SEQ ID NO: 3179 - RNA, 20 nt, Artificial Sequence
  synthetic polynucleotide
  misc_feature (1)..(20): combination of 2'-fluoro, 2'-O-methyl, inverted abasic, phosphorothioate linked ribonucleotides
cgcuucaaugucccagugca

SEQ ID NO: 3180 - RNA, 20 nt, Artificial Sequence
  synthetic polynucleotide
  misc_feature (1)..(20): combination of 2'-fluoro, 2'-O-methyl, inverted abasic, phosphorothioate linked ribonucleotides
ccagacagcauuggauuucc

SEQ ID NO: 3181 - RNA, 20 nt, Artificial Sequence
  synthetic polynucleotide
  misc_feature (1)..(20): combination of 2'-fluoro, 2'-O-methyl, inverted abasic, phosphorothioate linked ribonucleotides
cggaaaaucaccacucuuug

SEQ ID NO: 3182 - RNA, 20 nt, Artificial Sequence
  synthetic polynucleotide
  misc_feature (1)..(20): combination of 2'-fluoro, 2'-O-methyl, inverted abasic, phosphorothioate linked ribonucleotides
ggacagcauuggauuuccua

SEQ ID NO: 3183 - RNA, 20 nt, Artificial Sequence
  synthetic polynucleotide
  misc_feature (1)..(20): combination of 2'-fluoro, 2'-O-methyl, inverted abasic, phosphorothioate linked ribonucleotides
gcaggauucugaaaacuccc

SEQ ID NO: 3184 - RNA, 20 nt, Artificial Sequence
  synthetic polynucleotide
  misc_feature (1)..(20): combination of 2'-fluoro, 2'-O-methyl, inverted abasic, phosphorothioate linked ribonucleotides
gauggcuuguuccagauguu

SEQ ID NO: 3185 - RNA, 20 nt, Artificial Sequence
  synthetic polynucleotide
  misc_feature (1)..(20): combination of 2'-fluoro, 2'-O-methyl, inverted abasic, phosphorothioate linked ribonucleotides
uccuggaauauuagaugcuu

SEQ ID NO: 3186 - RNA, 20 nt, Artificial Sequence
  synthetic polynucleotide
  misc_feature (1)..(20): combination of 2'-fluoro, 2'-O-methyl, inverted abasic, phosphorothioate linked ribonucleotides
ucuaagaucugaugaaguau

SEQ ID NO: 3187 - RNA, 20 nt, Artificial Sequence
  synthetic polynucleotide
  misc_feature (1)..(20): combination of 2'-fluoro, 2'-O-methyl, inverted abasic, phosphorothioate linked ribonucleotides
gugauggcuuguuccagaug

SEQ ID NO: 3188 - RNA, 20 nt, Artificial Sequence
  synthetic polynucleotide
  misc_feature (1)..(20): combination of 2'-fluoro, 2'-O-methyl, inverted abasic, phosphorothioate linked ribonucleotides
uguccuggaauauuagaugc

SEQ ID NO: 3189 - RNA, 20 nt, Artificial Sequence
  synthetic polynucleotide
  misc_feature (1)..(20): combination of 2'-fluoro, 2'-O-methyl, inverted abasic, phosphorothioate linked ribonucleotides
guccuggaauauuagaugcc

SEQ ID NO: 3190 - RNA, 20 nt, Artificial Sequence
  synthetic polynucleotide
  misc_feature (1)..(20): combination of 2'-fluoro, 2'-O-methyl, inverted abasic, phosphorothioate linked ribonucleotides
acucuaagaucugaugaagu

SEQ ID NO: 3191 - RNA, 20 nt, Artificial Sequence
  synthetic polynucleotide
  misc_feature (1)..(20): combination of 2'-fluoro, 2'-O-methyl, inverted abasic, phosphorothioate linked ribonucleotides
uccuggaauauuagaugccu

SEQ ID NO: 3192 - RNA, 20 nt, Artificial Sequence
  synthetic polynucleotide
  misc_feature (1)..(20): combination of 2'-fluoro, 2'-O-methyl, inverted abasic, phosphorothioate linked ribonucleotides
cccuggaauauuagaugccu

SEQ ID NO: 3193 - RNA, 20 nt, Artificial Sequence
  synthetic polynucleotide
  misc_feature (1)..(20): combination of 2'-fluoro, 2'-O-methyl, inverted abasic, phosphorothioate linked ribonucleotides
gcucuaagaucugaugaagu

SEQ ID NO: 3194 - RNA, 20 nt, Artificial Sequence
  synthetic polynucleotide
  misc_feature (1)..(20): combination of 2'-fluoro, 2'-O-methyl, inverted abasic, phosphorothioate linked ribonucleotides
cguccuggaauauuagaugc

SEQ ID NO: 3195 - RNA, 20 nt, Artificial Sequence
  synthetic polynucleotide
  misc_feature (1)..(20): combination of 2'-fluoro, 2'-O-methyl, inverted abasic, phosphorothioate linked ribonucleotides
caacucuaagaucugaugaa

SEQ ID NO: 3196 - RNA, 20 nt, Artificial Sequence
  synthetic polynucleotide
  misc_feature (1)..(20): combination of 2'-fluoro, 2'-O-methyl, inverted abasic, phosphorothioate linked ribonucleotides
ggaagaaaagugauucagug

SEQ ID NO: 3197 - RNA, 20 nt, Artificial Sequence
  synthetic polynucleotide
  misc_feature (1)..(20): combination of 2'-fluoro, 2'-O-methyl, inverted abasic, phosphorothioate linked ribonucleotides
guccuggaauauuagaugcc

SEQ ID NO: 3198 - RNA, 20 nt, Artificial Sequence
  synthetic polynucleotide
  misc_feature (1)..(20): combination of 2'-fluoro, 2'-O-methyl, inverted abasic, phosphorothioate linked ribonucleotides
uccuggaauauuagaugccu

SEQ ID NO: 3199 - RNA, 20 nt, Artificial Sequence
  synthetic polynucleotide
  misc_feature (1)..(20): combination of 2'-fluoro, 2'-O-methyl, inverted abasic, phosphorothioate linked ribonucleotides
acucuaagaucugaugaagu

SEQ ID NO: 3200 - RNA, 20 nt, Artificial Sequence
  synthetic polynucleotide
  misc_feature (1)..(20): combination of 2'-fluoro, 2'-O-methyl, inverted abasic, phosphorothioate linked ribonucleotides
agacagcauuggauuuccua

SEQ ID NO: 3201 - RNA, 20 nt, Artificial Sequence
  synthetic polynucleotide
  misc_feature (1)..(20): combination of 2'-fluoro, 2'-O-methyl, inverted abasic, phosphorothioate linked ribonucleotides
guccaggaauauuagaugcc

SEQ ID NO: 3202 - RNA, 20 nt, Artificial Sequence
  synthetic polynucleotide
  misc_feature (1)..(20): combination of 2'-fluoro, 2'-O-methyl, inverted abasic, phosphorothioate linked ribonucleotides
gugcuggaauauuagaugcc

SEQ ID NO: 3203 - RNA, 20 nt, Artificial Sequence
  synthetic polynucleotide
  misc_feature (1)..(20): combination of 2'-fluoro, 2'-O-methyl, inverted abasic, phosphorothioate linked ribonucleotides
uccucgaauauuagaugccu

SEQ ID NO: 3204 - RNA, 20 nt, Artificial Sequence
  synthetic polynucleotide
  misc_feature (1)..(20): combination of 2'-fluoro, 2'-O-methyl, inverted abasic, phosphorothioate linked ribonucleotides
ucguggaauauuagaugccu

SEQ ID NO: 3205 - RNA, 20 nt, Artificial Sequence
  synthetic polynucleotide
  misc_feature (1)..(20): combination of 2'-fluoro, 2'-O-methyl, inverted abasic, phosphorothioate linked ribonucleotides
acacuaagaucugaugaagu

SEQ ID NO: 3206 - RNA, 20 nt, Artificial Sequence
  synthetic polynucleotide
  misc_feature (1)..(20): combination of 2'-fluoro, 2'-O-methyl, inverted abasic, phosphorothioate linked ribonucleotides
agucuaagaucugaugaagu

SEQ ID NO: 3207 - RNA, 20 nt, Artificial Sequence
  synthetic polynucleotide
  misc_feature (1)..(20): combination of 2'-fluoro, 2'-O-methyl, inverted abasic, phosphorothioate linked ribonucleotides
agucagcauuggauuuccua

SEQ ID NO: 3208 - RNA, 20 nt, Artificial Sequence
  synthetic polynucleotide
  misc_feature (1)..(20): combination of 2'-fluoro, 2'-O-methyl, inverted abasic, phosphorothioate linked ribonucleotides
acacagcauuggauuuccua

SEQ ID NO: 3209 - RNA, 20 nt, Artificial Sequence
  synthetic polynucleotide
  misc_feature (1)..(20): combination of 2'-fluoro, 2'-O-methyl, inverted abasic, phosphorothioate linked ribonucleotides
guccuggaauauuagaugcc

SEQ ID NO: 3210 - RNA, 20 nt, Artificial Sequence
  synthetic polynucleotide
  misc_feature (1)..(20): combination of 2'-fluoro, 2'-O-methyl, inverted abasic, phosphorothioate linked ribonucleotides
guccuggaauauuagaugcc

SEQ ID NO: 3211 - RNA, 20 nt, Artificial Sequence
  synthetic polynucleotide
  misc_feature (1)..(20): combination of 2'-fluoro, 2'-O-methyl, inverted abasic, phosphorothioate linked ribonucleotides
guccuggaauauuagaugcc

SEQ ID NO: 3212 - RNA, 20 nt, Artificial Sequence
  synthetic polynucleotide
  misc_feature (1)..(20): combination of 2'-fluoro, 2'-O-methyl, inverted abasic, phosphorothioate linked ribonucleotides
auguccuggaauauuagaug

SEQ ID NO: 3213 - RNA, 20 nt, Artificial Sequence
  synthetic polynucleotide
  misc_feature (1)..(20): combination of 2'-fluoro, 2'-O-methyl, inverted abasic, phosphorothioate linked ribonucleotides
uauaacucuaagaucugaug

SEQ ID NO: 3214 - RNA, 20 nt, Artificial Sequence
  synthetic polynucleotide
  misc_feature (1)..(20): combination of 2'-fluoro, 2'-O-methyl, inverted abasic, phosphorothioate linked ribonucleotides
uaagaucugaugaaguauau

SEQ ID NO: 3215 - RNA, 20 nt, Artificial Sequence
  synthetic polynucleotide
  misc_feature (1)..(20): combination of 2'-fluoro, 2'-O-methyl, inverted abasic, phosphorothioate linked ribonucleotides
ggugucucaaugcuucaaug

SEQ ID NO: 3216 - RNA, 20 nt, Artificial Sequence
  synthetic polynucleotide
  misc_feature (1)..(20): combination of 2'-fluoro, 2'-O-methyl, inverted abasic, phosphorothioate linked ribonucleotides
gugucucaaugcuucaaugu

SEQ ID NO: 3217 - RNA, 20 nt, Artificial Sequence
  synthetic polynucleotide
  misc_feature (1)..(20): combination of 2'-fluoro, 2'-O-methyl, inverted abasic, phosphorothioate linked ribonucleotides
ucucaaugcuucaauguccc

SEQ ID NO: 3218 - RNA, 20 nt, Artificial Sequence
  synthetic polynucleotide
  misc_feature (1)..(20): combination of 2'-fluoro, 2'-O-methyl, inverted abasic, phosphorothioate linked ribonucleotides
aaugcuucaaugucccagug

SEQ ID NO: 3219 - RNA, 20 nt, Artificial Sequence
  synthetic polynucleotide
  misc_feature (1)..(20): combination of 2'-fluoro, 2'-O-methyl, inverted abasic, phosphorothioate linked ribonucleotides
augcuucaaugucccagugc

SEQ ID NO: 3220 - RNA, 20 nt, Artificial Sequence
  synthetic polynucleotide
  misc_feature (1)..(20): combination of 2'-fluoro, 2'-O-methyl, inverted abasic, phosphorothioate linked ribonucleotides
uccuggaauauuagaugccu

SEQ ID NO: 3221 - RNA, 20 nt, Artificial Sequence
  synthetic polynucleotide
  misc_feature (1)..(20): combination of 2'-fluoro, 2'-O-methyl, inverted abasic, phosphorothioate linked ribonucleotides
acucuaagaucugaugaagu

SEQ ID NO: 3222 - RNA, 20 nt, Artificial Sequence
  synthetic polynucleotide
  misc_feature (1)..(20): combination of 2'-fluoro, 2'-O-methyl, inverted abasic, phosphorothioate linked ribonucleotides
guccuggaauauuagaugcc

SEQ ID NO: 3223 - RNA, 20 nt, Artificial Sequence
  synthetic polynucleotide
  misc_feature (1)..(20): combination of 2'-fluoro, 2'-O-methyl, inverted abasic, phosphorothioate linked ribonucleotides
uguccuggaauauuagaugc

SEQ ID NO: 3224 - RNA, 20 nt, Artificial Sequence
  synthetic polynucleotide
  misc_feature (1)..(20): combination of 2'-fluoro, 2'-O-methyl, inverted abasic, phosphorothioate linked ribonucleotides
uaacucuaagaucugaugaa

SEQ ID NO: 3225 - RNA, 20 nt, Artificial Sequence
  synthetic polynucleotide
  misc_feature (1)..(20): combination of 2'-fluoro, 2'-O-methyl, inverted abasic, phosphorothioate linked ribonucleotides
uaacucuaagaucugaugaa

SEQ ID NO: 3226 - RNA, 20 nt, Artificial Sequence
  synthetic polynucleotide
  misc_feature (1)..(20): combination of 2'-fluoro, 2'-O-methyl, inverted abasic, phosphorothioate linked ribonucleotides
ugauggcuuguuccagaugc

SEQ ID NO: 3227 - RNA, 20 nt, Artificial Sequence
  synthetic polynucleotide
  misc_feature (1)..(20): combination of 2'-fluoro, 2'-O-methyl, inverted abasic, phosphorothioate linked ribonucleotides
gauggcuuguuccagaugca

SEQ ID NO: 3228 - RNA, 20 nt, Artificial Sequence
  synthetic polynucleotide
  misc_feature (1)..(20): combination of 2'-fluoro, 2'-O-methyl, inverted abasic, phosphorothioate linked ribonucleotides
cucagacagcauuggauuuc

SEQ ID NO: 3229 - RNA, 20 nt, Artificial Sequence
  synthetic polynucleotide
  misc_feature (1)..(20): combination of 2'-fluoro, 2'-O-methyl, inverted abasic, phosphorothioate linked ribonucleotides
ugccauuuuguccuuugauu

SEQ ID NO: 3230 - RNA, 20 nt, Artificial Sequence
  synthetic polynucleotide
  misc_feature (1)..(20): combination of 2'-fluoro, 2'-O-methyl, inverted abasic, phosphorothioate linked ribonucleotides
ccauuuuguccuuugauuau

SEQ ID NO: 3231 - RNA, 20 nt, Artificial Sequence
  synthetic polynucleotide
  misc_feature (1)..(20): combination of 2'-fluoro, 2'-O-methyl, inverted abasic, phosphorothioate linked ribonucleotides
ugauggcuuguuccagaugc

SEQ ID NO: 3232 - RNA, 20 nt, Artificial Sequence
  synthetic polynucleotide
  misc_feature (1)..(20): combination of 2'-fluoro, 2'-O-methyl, inverted abasic, phosphorothioate linked ribonucleotides
gauggcuuguuccagaugca

SEQ ID NO: 3233 - RNA, 20 nt, Artificial Sequence
  synthetic polynucleotide
  misc_feature (1)..(20): combination of 2'-fluoro, 2'-O-methyl, inverted abasic, phosphorothioate linked ribonucleotides
cucagacagcauuggauuuc

SEQ ID NO: 3234 - RNA, 20 nt, Artificial Sequence
  synthetic polynucleotide
  misc_feature (1)..(20): combination of 2'-fluoro, 2'-O-methyl, inverted abasic, phosphorothioate linked ribonucleotides
ugccauuuuguccuuugauu

SEQ ID NO: 3235 - RNA, 20 nt, Artificial Sequence
  synthetic polynucleotide
  misc_feature (1)..(20): combination of 2'-fluoro, 2'-O-methyl, inverted abasic, phosphorothioate linked ribonucleotides
ccauuuuguccuuugauuau

SEQ ID NO: 3236 - RNA, 20 nt, Artificial Sequence
  synthetic polynucleotide
  misc_feature (1)..(20): combination of 2'-fluoro, 2'-O-methyl, inverted abasic, phosphorothioate linked ribonucleotides
gauuuucacauuuuucgucu

SEQ ID NO: 3237 - RNA, 20 nt, Artificial Sequence
  synthetic polynucleotide
  misc_feature (1)..(20): combination of 2'-fluoro, 2'-O-methyl, inverted abasic, phosphorothioate linked ribonucleotides
gauuuucacauuuuucgucu

SEQ ID NO: 3238 - RNA, 20 nt, Artificial Sequence
  synthetic polynucleotide
  misc_feature (1)..(20): combination of 2'-fluoro, 2'-O-methyl, inverted abasic, phosphorothioate linked ribonucleotides
gaauauuagaugccuuuuaa

SEQ ID NO: 3239 - RNA, 20 nt, Artificial Sequence
  synthetic polynucleotide
  misc_feature (1)..(20): combination of 2'-fluoro, 2'-O-methyl, inverted abasic, phosphorothioate linked ribonucleotides
aggaaagcauaugucaguug

SEQ ID NO: 3240 - RNA, 20 nt, Artificial Sequence
  synthetic polynucleotide
  misc_feature (1)..(20): combination of 2'-fluoro, 2'-O-methyl, inverted abasic, phosphorothioate linked ribonucleotides
gccauuuuguccuuugauua

SEQ ID NO: 3241 - RNA, 20 nt, Artificial Sequence
  synthetic polynucleotide
  misc_feature (1)..(20): combination of 2'-fluoro, 2'-O-methyl, inverted abasic, phosphorothioate linked ribonucleotides
gauuuucacauuuuucgucu

SEQ ID NO: 3242 - RNA, 20 nt, Artificial Sequence
  synthetic polynucleotide
  misc_feature (1)..(20): combination of 2'-fluoro, 2'-O-methyl, inverted abasic, phosphorothioate linked ribonucleotides
augcuucaaugucccaguuu

SEQ ID NO: 3243 - RNA, 20 nt, Artificial Sequence
  synthetic polynucleotide
  misc_feature (1)..(20): combination of 2'-fluoro, 2'-O-methyl, inverted abasic, phosphorothioate linked ribonucleotides
aaauauagucucaauaacuu

SEQ ID NO: 3244 - RNA, 20 nt, Artificial Sequence
  synthetic polynucleotide
  misc_feature (1)..(20): combination of 2'-fluoro, 2'-O-methyl, inverted abasic, phosphorothioate linked ribonucleotides
uaccaagagcgcagacuugc

SEQ ID NO: 3245 - RNA, 20 nt, Artificial Sequence
  synthetic polynucleotide
  misc_feature (1)..(20): combination of 2'-fluoro, 2'-O-methyl, inverted abasic, phosphorothioate linked ribonucleotides
gaugccuuuuaaaaauguuc

SEQ ID NO: 3246 - RNA, 20 nt, Artificial Sequence
  synthetic polynucleotide
  misc_feature (1)..(20): combination of 2'-fluoro, 2'-O-methyl, inverted abasic, phosphorothioate linked ribonucleotides
auguccuggaauauuagaug

SEQ ID NO: 3247 - RNA, 20 nt, Artificial Sequence
  synthetic polynucleotide
  misc_feature (1)..(20): combination of 2'-fluoro, 2'-O-methyl, inverted abasic, phosphorothioate linked ribonucleotides
uuuucacauuuuucgucuuu

SEQ ID NO: 3248 - RNA, 20 nt, Artificial Sequence
  synthetic polynucleotide
  misc_feature (1)..(20): combination of 2'-fluoro, 2'-O-methyl, inverted abasic, phosphorothioate linked ribonucleotides
auauuagaugccuuuuaaau

SEQ ID NO: 3249 - RNA, 20 nt, Artificial Sequence
  synthetic polynucleotide
  misc_feature (1)..(20): combination of 2'-fluoro, 2'-O-methyl, inverted abasic, phosphorothioate linked ribonucleotides
gaaagcauaugucaguuguu

SEQ ID NO: 3250 - RNA, 20 nt, Artificial Sequence
  synthetic polynucleotide
  misc_feature (1)..(20): combination of 2'-fluoro, 2'-O-methyl, inverted abasic, phosphorothioate linked ribonucleotides
cauuuuguccuuugauuauu

SEQ ID NO: 3251 - RNA, 20 nt, Artificial Sequence
  synthetic polynucleotide
  misc_feature (1)..(20): combination of 2'-fluoro, 2'-O-methyl, inverted abasic, phosphorothioate linked ribonucleotides
auauagucucaauaacuuau

SEQ ID NO: 3252 - RNA, 20 nt, Artificial Sequence
  synthetic polynucleotide
  misc_feature (1)..(20): combination of 2'-fluoro, 2'-O-methyl, inverted abasic, phosphorothioate linked ribonucleotides
ccaagagcgcagacuugcau

SEQ ID NO: 3253 - RNA, 20 nt, Artificial Sequence
  synthetic polynucleotide
  misc_feature (1)..(20): combination of 2'-fluoro, 2'-O-methyl, inverted abasic, phosphorothioate linked ribonucleotides
ugccuuuuaaaaauguucuu

SEQ ID NO: 3254 - RNA, 20 nt, Artificial Sequence
  synthetic polynucleotide
  misc_feature (1)..(20): combination of 2'-fluoro, 2'-O-methyl, inverted abasic, phosphorothioate linked ribonucleotides
guccuggaauauuagauguu

SEQ ID NO: 3255 - RNA, 20 nt, Artificial Sequence
  synthetic polynucleotide
  misc_feature (1)..(20): combination of 2'-fluoro, 2'-O-methyl, inverted abasic, phosphorothioate linked ribonucleotides
gcucuaagaucugaugaagu

SEQ ID NO: 3256 - RNA, 20 nt, Artificial Sequence
  synthetic polynucleotide
  misc_feature (1)..(20): combination of 2'-fluoro, 2'-O-methyl, inverted abasic, phosphorothioate linked ribonucleotides
ccuaagaucugaugaaguau

SEQ ID NO: 3257 - RNA, 20 nt, Artificial Sequence
  synthetic polynucleotide
  misc_feature (1)..(20): combination of 2'-fluoro, 2'-O-methyl, inverted abasic, phosphorothioate linked ribonucleotides
ccuaagaucugaugaaguau

SEQ ID NO: 3258 - RNA, 20 nt, Artificial Sequence
  synthetic polynucleotide
  misc_feature (1)..(20): combination of 2'-fluoro, 2'-O-methyl, inverted abasic, phosphorothioate linked ribonucleotides
agaagaaaagugauucagug

SEQ ID NO: 3259 - RNA, 20 nt, Artificial Sequence
  synthetic polynucleotide
  misc_feature (1)..(20): combination of 2'-fluoro, 2'-O-methyl, inverted abasic, phosphorothioate linked ribonucleotides
acucuaagaucugaugaauu

SEQ ID NO: 3260 - RNA, 20 nt, Artificial Sequence
  synthetic polynucleotide
  misc_feature (1)..(20): combination of 2'-fluoro, 2'-O-methyl, inverted abasic, phosphorothioate linked ribonucleotides
aagaaaagugauucagugau

SEQ ID NO: 3261 - RNA, 20 nt, Artificial Sequence
  synthetic polynucleotide
  misc_feature (1)..(20): combination of 2'-fluoro, 2'-O-methyl, inverted abasic, phosphorothioate linked ribonucleotides
ccuggaauauuagaugccuu

SEQ ID NO: 3262 - RNA, 20 nt, Artificial Sequence
  synthetic polynucleotide
  misc_feature (1)..(20): combination of 2'-fluoro, 2'-O-methyl, inverted abasic, phosphorothioate linked ribonucleotides
uagcagacuuguuccgacuu

SEQ ID NO: 3263 - RNA, 20 nt, Artificial Sequence
  synthetic polynucleotide
  misc_feature (1)..(20): combination of 2'-fluoro, 2'-O-methyl, inverted abasic, phosphorothioate linked ribonucleotides
ccguuuaacugauuauggau

SEQ ID NO: 3264 - RNA, 20 nt, Artificial Sequence
  synthetic polynucleotide
  misc_feature (1)..(20): combination of 2'-fluoro, 2'-O-methyl, inverted abasic, phosphorothioate linked ribonucleotides
gacaacacuugaagcauguu

SEQ ID NO: 3265 - RNA, 20 nt, Artificial Sequence
  synthetic polynucleotide
  misc_feature (1)..(20): combination of 2'-fluoro, 2'-O-methyl, inverted abasic, phosphorothioate linked ribonucleotides
uugccauuuuguccuuugau

SEQ ID NO: 3266 - RNA, 20 nt, Artificial Sequence
  synthetic polynucleotide
  misc_feature (1)..(20): combination of 2'-fluoro, 2'-O-methyl, inverted abasic, phosphorothioate linked ribonucleotides
uaacucuaagaucugaugau

SEQ ID NO: 3267 - RNA, 20 nt, Artificial Sequence
  synthetic polynucleotide
  misc_feature (1)..(20): combination of 2'-fluoro, 2'-O-methyl, inverted abasic, phosphorothioate linked ribonucleotides
gucucaaugcuucaauguuu

SEQ ID NO: 3268 - RNA, 20 nt, Artificial Sequence
  synthetic polynucleotide
  misc_feature (1)..(20): combination of 2'-fluoro, 2'-O-methyl, inverted abasic, phosphorothioate linked ribonucleotides
aauagcagacuuguuccgac

SEQ ID NO: 3269 - RNA, 20 nt, Artificial Sequence
  synthetic polynucleotide
  misc_feature (1)..(20): combination of 2'-fluoro, 2'-O-methyl, inverted abasic, phosphorothioate linked ribonucleotides
ccccguuuaacugauuaugg

SEQ ID NO: 3270 - RNA, 20 nt, Artificial Sequence
  synthetic polynucleotide
  misc_feature (1)..(20): combination of 2'-fluoro, 2'-O-methyl, inverted abasic, phosphorothioate linked ribonucleotides
augacaacacuugaagcaug

SEQ ID NO: 3271 - RNA, 20 nt, Artificial Sequence
  synthetic polynucleotide
  misc_feature (1)..(20): combination of 2'-fluoro, 2'-O-methyl, inverted abasic, phosphorothioate linked ribonucleotides
uauugccauuuuguccuuug

SEQ ID NO: 3272 - RNA, 20 nt, Artificial Sequence
  synthetic polynucleotide
  misc_feature (1)..(20): combination of 2'-fluoro, 2'-O-methyl, inverted abasic, phosphorothioate linked ribonucleotides
uauaacucuaagaucugaug

SEQ ID NO: 3273 - RNA, 20 nt, Artificial Sequence
  synthetic polynucleotide
  misc_feature (1)..(20): combination of 2'-fluoro, 2'-O-methyl, inverted abasic, phosphorothioate linked ribonucleotides
gugucucaaugcuucaaugu

SEQ ID NO: 3274 - RNA, 20 nt, Artificial Sequence
  synthetic polynucleotide
  misc_feature (1)..(20): combination of 2'-fluoro, 2'-O-methyl, inverted abasic, phosphorothioate linked ribonucleotides
gugauggcuuguuccggaug

SEQ ID NO: 3275 - RNA, 20 nt, Artificial Sequence
  synthetic polynucleotide
  misc_feature (1)..(20): combination of 2'-fluoro, 2'-O-methyl, inverted abasic, phosphorothioate linked ribonucleotides
gugauggcuuguugcagaug

SEQ ID NO: 3276 - RNA, 20 nt, Artificial Sequence
  synthetic polynucleotide
  misc_feature (1)..(20): combination of 2'-fluoro, 2'-O-methyl, inverted abasic, phosphorothioate linked ribonucleotides
cagaacgaaaguuaugugga

SEQ ID NO: 3277 - RNA, 20 nt, Artificial Sequence
  synthetic polynucleotide
  misc_feature (1)..(20): combination of 2'-fluoro, 2'-O-methyl, inverted abasic, phosphorothioate linked ribonucleotides
cagaacgaaaguuguaugga

SEQ ID NO: 3278 - RNA, 20 nt, Artificial Sequence
  synthetic polynucleotide
  misc_feature (1)..(20): combination of 2'-fluoro, 2'-O-methyl, inverted abasic, phosphorothioate linked ribonucleotides
uauguccuggaauauaagau

SEQ ID NO: 3279 - RNA, 20 nt, Artificial Sequence
  synthetic polynucleotide
  misc_feature (1)..(20): combination of 2'-fluoro, 2'-O-methyl, inverted abasic, phosphorothioate linked ribonucleotides
uauguccuggaauguuagau

SEQ ID NO: 3280 - RNA, 20 nt, Artificial Sequence
  synthetic polynucleotide
  misc_feature (1)..(20): combination of 2'-fluoro, 2'-O-methyl, inverted abasic, phosphorothioate linked ribonucleotides
auguccuggaauauuggaug

SEQ ID NO: 3281 - RNA, 20 nt, Artificial Sequence
  synthetic polynucleotide
  misc_feature (1)..(20): combination of 2'-fluoro, 2'-O-methyl, inverted abasic, phosphorothioate linked ribonucleotides
auguccuggaauaauagaug

SEQ ID NO: 3282 - RNA, 20 nt, Artificial Sequence
  synthetic polynucleotide
  misc_feature (1)..(20): combination of 2'-fluoro, 2'-O-methyl, inverted abasic, phosphorothioate linked ribonucleotides
uguccuggaauauuaaaugc

SEQ ID NO: 3283 - RNA, 20 nt, Artificial Sequence
  synthetic polynucleotide
  misc_feature (1)..(20): combination of 2'-fluoro, 2'-O-methyl, inverted abasic, phosphorothioate linked ribonucleotides
uguccuggaauauaagaugc

SEQ ID NO: 3284 - RNA, 20 nt, Artificial Sequence
  synthetic polynucleotide
  misc_feature (1)..(20): combination of 2'-fluoro, 2'-O-methyl, inverted abasic, phosphorothioate linked ribonucleotides
ccuggaauauuaggugccuu

SEQ ID NO: 3285 - RNA, 20 nt, Artificial Sequence
  synthetic polynucleotide
  misc_feature (1)..(20): combination of 2'-fluoro, 2'-O-methyl, inverted abasic, phosphorothioate linked ribonucleotides
ccuggaauauuggaugccuu

SEQ ID NO: 3286 - RNA, 20 nt, Artificial Sequence
  synthetic polynucleotide
  misc_feature (1)..(20): combination of 2'-fluoro, 2'-O-methyl, inverted abasic, phosphorothioate linked ribonucleotides
uccuggaauauuagaagccu

SEQ ID NO: 3287 - RNA, 20 nt, Artificial Sequence
  synthetic polynucleotide
  misc_feature (1)..(20): combination of 2'-fluoro, 2'-O-methyl, inverted abasic, phosphorothioate linked ribonucleotides
uccuggaauauuaaaugccu

SEQ ID NO: 3288 - RNA, 20 nt, Artificial Sequence
  synthetic polynucleotide
  misc_feature (1)..(20): combination of 2'-fluoro, 2'-O-methyl, inverted abasic, phosphorothioate linked ribonucleotides
ccuggaauauuagauaccuu

SEQ ID NO: 3289 - RNA, 20 nt, Artificial Sequence
  synthetic polynucleotide
  misc_feature (1)..(20): combination of 2'-fluoro, 2'-O-methyl, inverted abasic, phosphorothioate linked ribonucleotides
cuggaauauuagauggcuuu

SEQ ID NO: 3290 - RNA, 20 nt, Artificial Sequence
  synthetic polynucleotide
  misc_feature (1)..(20): combination of 2'-fluoro, 2'-O-methyl, inverted abasic, phosphorothioate linked ribonucleotides
cuggaauauuagaagccuuu

SEQ ID NO: 3291 - RNA, 20 nt, Artificial Sequence
  synthetic polynucleotide
  misc_feature (1)..(20): combination of 2'-fluoro, 2'-O-methyl, inverted abasic, phosphorothioate linked ribonucleotides
gaauauuagaugccuauuaa

SEQ ID NO: 3292 - RNA, 20 nt, Artificial Sequence
  synthetic polynucleotide
  misc_feature (1)..(20): combination of 2'-fluoro, 2'-O-methyl, inverted abasic, phosphorothioate linked ribonucleotides
gaauauuagaugcguuuuaa

SEQ ID NO: 3293 - RNA, 20 nt, Artificial Sequence
  synthetic polynucleotide
  misc_feature (1)..(20): combination of 2'-fluoro, 2'-O-methyl, inverted abasic, phosphorothioate linked ribonucleotides
gaugccuuuuaaaaaaguuc

SEQ ID NO: 3294 - RNA, 20 nt, Artificial Sequence
  synthetic polynucleotide
  misc_feature (1)..(20): combination of 2'-fluoro, 2'-O-methyl, inverted abasic, phosphorothioate linked ribonucleotides
gaugccuuuuaaagauguuc

SEQ ID NO: 3295 - RNA, 20 nt, Artificial Sequence
  synthetic polynucleotide
  misc_feature (1)..(20): combination of 2'-fluoro, 2'-O-methyl, inverted abasic, phosphorothioate linked ribonucleotides
gauuuucacauuuuuggucu

SEQ ID NO: 3296 - RNA, 20 nt, Artificial Sequence
  synthetic polynucleotide
  misc_feature (1)..(20): combination of 2'-fluoro, 2'-O-methyl, inverted abasic, phosphorothioate linked ribonucleotides
gauuuucacauuuaucgucu

SEQ ID NO: 3297 - RNA, 20 nt, Artificial Sequence
  synthetic polynucleotide
  misc_feature (1)..(20): combination of 2'-fluoro, 2'-O-methyl, inverted abasic, phosphorothioate linked ribonucleotides
cucaaugcuucaaugaccca

SEQ ID NO: 3298 - RNA, 20 nt, Artificial Sequence
  synthetic polynucleotide
  misc_feature (1)..(20): combination of 2'-fluoro, 2'-O-methyl, inverted abasic, phosphorothioate linked ribonucleotides
cucaaugcuucaaaguccca

SEQ ID NO: 3299 - RNA, 20 nt, Artificial Sequence
  synthetic polynucleotide
  misc_feature (1)..(20): combination of 2'-fluoro, 2'-O-methyl, inverted abasic, phosphorothioate linked ribonucleotides
caaugcuucaaugucgcagu

SEQ ID NO: 3300 - RNA, 20 nt, Artificial Sequence
  synthetic polynucleotide
  misc_feature (1)..(20): combination of 2'-fluoro, 2'-O-methyl, inverted abasic, phosphorothioate linked ribonucleotides
caaugcuucaaugacccagu

SEQ ID NO: 3301 - RNA, 20 nt, Artificial Sequence
  synthetic polynucleotide
  misc_feature (1)..(20): combination of 2'-fluoro, 2'-O-methyl, inverted abasic, phosphorothioate linked ribonucleotides
aaauauagucucaaugacuu

SEQ ID NO: 3302 - RNA, 20 nt, Artificial Sequence
  synthetic polynucleotide
  misc_feature (1)..(20): combination of 2'-fluoro, 2'-O-methyl, inverted abasic, phosphorothioate linked ribonucleotides
aaauauagucucaguaacuu

SEQ ID NO: 3303 - RNA, 20 nt, Artificial Sequence
  synthetic polynucleotide
  misc_feature (1)..(20): combination of 2'-fluoro, 2'-O-methyl, inverted abasic, phosphorothioate linked ribonucleotides
gcaggauucugaaaaguccc

SEQ ID NO: 3304 - RNA, 20 nt, Artificial Sequence
  synthetic polynucleotide
  misc_feature (1)..(20): combination of 2'-fluoro, 2'-O-methyl, inverted abasic, phosphorothioate linked ribonucleotides
gcaggauucugaagacuccc

SEQ ID NO: 3305 - RNA, 20 nt, Artificial Sequence
  synthetic polynucleotide
  misc_feature (1)..(20): combination of 2'-fluoro, 2'-O-methyl, inverted abasic, phosphorothioate linked ribonucleotides
uaccaagagcgcagaguugc

SEQ ID NO: 3306 - RNA, 20 nt, Artificial Sequence
  synthetic polynucleotide
  misc_feature (1)..(20): combination of 2'-fluoro, 2'-O-methyl, inverted abasic, phosphorothioate linked ribonucleotides
uaccaagagcgcaaacuugc

SEQ ID NO: 3307 - RNA, 20 nt, Artificial Sequence
  synthetic polynucleotide
  misc_feature (1)..(20): combination of 2'-fluoro, 2'-O-methyl, inverted abasic, phosphorothioate linked ribonucleotides
aggaaagcauaugucgguug

SEQ ID NO: 3308 - RNA, 20 nt, Artificial Sequence
  synthetic polynucleotide
  misc_feature (1)..(20): combination of 2'-fluoro, 2'-O-methyl, inverted abasic, phosphorothioate linked ribonucleotides
aggaaagcauaugacaguug

SEQ ID NO: 3309 - RNA, 20 nt, Artificial Sequence
  synthetic polynucleotide
  misc_feature (1)..(20): combination of 2'-fluoro, 2'-O-methyl, inverted abasic, phosphorothioate linked ribonucleotides
guuuaaaacccaaaaucuau

SEQ ID NO: 3310 - RNA, 20 nt, Artificial Sequence
  synthetic polynucleotide
  misc_feature (1)..(20): combination of 2'-fluoro, 2'-O-methyl, inverted abasic, phosphorothioate linked ribonucleotides
guuuaaaacccgauaucuau

SEQ ID NO: 3311 - RNA, 20 nt, Artificial Sequence
  synthetic polynucleotide
  misc_feature (1)..(20): combination of 2'-fluoro, 2'-O-methyl, inverted abasic, phosphorothioate linked ribonucleotides
uuaacugauuguauagcucu

SEQ ID NO: 3312 - RNA, 20 nt, Artificial Sequence
  synthetic polynucleotide
  misc_feature (1)..(20): combination of 2'-fluoro, 2'-O-methyl, inverted abasic, phosphorothioate linked ribonucleotides
uuaacugauuguaaaacucu

SEQ ID NO: 3313 - RNA, 20 nt, Artificial Sequence
  synthetic polynucleotide
  misc_feature (1)..(20): combination of 2'-fluoro, 2'-O-methyl, inverted abasic, phosphorothioate linked ribonucleotides
uaacucuaagaucuggugaa

SEQ ID NO: 3314 - RNA, 20 nt, Artificial Sequence
  synthetic polynucleotide
  misc_feature (1)..(20): combination of 2'-fluoro, 2'-O-methyl, inverted abasic, phosphorothioate linked ribonucleotides
uaacucuaagaucagaugaa

SEQ ID NO: 3315 - RNA, 20 nt, Artificial Sequence
  synthetic polynucleotide
  misc_feature (1)..(20): combination of 2'-fluoro, 2'-O-methyl, inverted abasic, phosphorothioate linked ribonucleotides
acucuaagaucugauaaagu

SEQ ID NO: 3316 - RNA, 20 nt, Artificial Sequence
  synthetic polynucleotide
  misc_feature (1)..(20): combination of 2'-fluoro, 2'-O-methyl, inverted abasic, phosphorothioate linked ribonucleotides
acucuaagaucuggugaagu

SEQ ID NO: 3317 - RNA, 20 nt, Artificial Sequence
  synthetic polynucleotide
  misc_feature (1)..(20): combination of 2'-fluoro, 2'-O-methyl, inverted abasic, phosphorothioate linked ribonucleotides
uauugccauuuugucguuug

SEQ ID NO: 3318 - RNA, 20 nt, Artificial Sequence
  synthetic polynucleotide
  misc_feature (1)..(20): combination of 2'-fluoro, 2'-O-methyl, inverted abasic, phosphorothioate linked ribonucleotides
uauugccauuuugaccuuug

SEQ ID NO: 3319 - RNA, 20 nt, Artificial Sequence
  synthetic polynucleotide
  misc_feature (1)..(20): combination of 2'-fluoro, 2'-O-methyl, inverted abasic, phosphorothioate linked ribonucleotides
gccauuuuguccuuuaauua

SEQ ID NO: 3320 - RNA, 20 nt, Artificial Sequence
  synthetic polynucleotide
  misc_feature (1)..(20): combination of 2'-fluoro, 2'-O-methyl, inverted abasic, phosphorothioate linked ribonucleotides
gccauuuuguccuaugauua

SEQ ID NO: 3321 - RNA, 23 nt, Artificial Sequence
  synthetic polynucleotide
  misc_feature (1)..(23): combination of 2'-fluoro, 2'-O-methyl, phosphorothioate linked ribonucleotides
aucuaauauuccaggacauacuu

SEQ ID NO: 3322 - RNA, 23 nt, Artificial Sequence
  synthetic polynucleotide
  misc_feature (1)..(23): combination of 2'-fluoro, 2'-O-methyl, phosphorothioate linked ribonucleotides
uuuaacuuucuucucuagccuuu

SEQ ID NO: 3323 - RNA, 23 nt, Artificial Sequence
  synthetic polynucleotide
  misc_feature (1)..(23): combination of 2'-fluoro, 2'-O-methyl, phosphorothioate linked ribonucleotides
aucagaucuuagaguuauacauu

SEQ ID NO: 3324 - RNA, 23 nt, Artificial Sequence
  synthetic polynucleotide
  misc_feature (1)..(20): combination of 2'-fluoro, 2'-O-methyl, phosphorothioate linked ribonucleotides
auaauauuccaggacauacgguu

SEQ ID NO: 3325 - RNA, 23 nt, Artificial Sequence
  synthetic polynucleotide
  misc_feature (1)..(23): combination of 2'-fluoro, 2'-O-methyl, phosphorothioate linked ribonucleotides
auucaaguguugucauuuuuguu

SEQ ID NO: 3326 - RNA, 23 nt, Artificial Sequence
  synthetic polynucleotide
  misc_feature (1)..(20): combination of 2'-fluoro, 2'-O-methyl, phosphorothioate linked ribonucleotides
acccuuuaaagguuuucaguauu

SEQ ID NO: 3327 - RNA, 23 nt, Artificial Sequence
  synthetic polynucleotide
  misc_feature (1)..(20): combination of 2'-fluoro, 2'-O-methyl, phosphorothioate linked ribonucleotides
acuuuaaagguuuucaguaguuu

SEQ ID NO: 3328 - RNA, 23 nt, Artificial Sequence
  synthetic polynucleotide
  misc_feature (1)..(20): combination of 2'-fluoro, 2'-O-methyl, phosphorothioate linked ribonucleotides
ucacugaaucacuuuucuucuuu

SEQ ID NO: 3329 - RNA, 23 nt, Artificial Sequence
  synthetic polynucleotide
  misc_feature (1)..(23): combination of 2'-fluoro, 2'-O-methyl, phosphorothioate linked ribonucleotides
aagcacaaaauacugcccaaauu

SEQ ID NO: 3330 - RNA, 23 nt, Artificial Sequence
  synthetic polynucleotide
  misc_feature (1)..(23): combination of 2'-fluoro, 2'-O-methyl, phosphorothioate linked ribonucleotides
ugcaagucugcgcucuugguauu

SEQ ID NO: 3331 - RNA, 23 nt, Artificial Sequence
  synthetic polynucleotide
  misc_feature (1)..(23): combination of 2'-fluoro, 2'-O-methyl, phosphorothioate linked ribonucleotides
accauuucaaaagcuagcccguu

SEQ ID NO: 3332 - RNA, 23 nt, Artificial Sequence
  synthetic polynucleotide
  misc_feature (1)..(23): combination of 2'-fluoro, 2'-O-methyl, phosphorothioate linked ribonucleotides
auaacucuucaguguuuccaguu

SEQ ID NO: 3333 - RNA, 23 nt, Artificial Sequence
  synthetic polynucleotide
  misc_feature (1)..(23): combination of 2'-fluoro, 2'-O-methyl, phosphorothioate linked ribonucleotides
uuacuuuuugcacugggacauuu

SEQ ID NO: 3334 - RNA, 23 nt, Artificial Sequence
  synthetic polynucleotide
  misc_feature (1)..(23): combination of 2'-fluoro, 2'-O-methyl, phosphorothioate linked ribonucleotides
aaaaggcaucuaauauuccaguu

SEQ ID NO: 3335 - RNA, 23 nt, Artificial Sequence
  synthetic polynucleotide
  misc_feature (1)..(23): combination of 2'-fluoro, 2'-O-methyl, phosphorothioate linked ribonucleotides
aaaggcaucuaauauuccagguu

SEQ ID NO: 3336 - RNA, 23 nt, Artificial Sequence
  synthetic polynucleotide
  misc_feature (1)..(23): combination of 2'-fluoro, 2'-O-methyl, phosphorothioate linked ribonucleotides
aaggcaucuaauauuccaggauu

SEQ ID NO: 3337 - RNA, 23 nt, Artificial Sequence
  synthetic polynucleotide
  misc_feature (1)..(23): combination of 2'-fluoro, 2'-O-methyl, phosphorothioate linked ribonucleotides
uacuucaucagaucuuagaguuu

SEQ ID NO: 3338 - RNA, 23 nt, Artificial Sequence
  synthetic polynucleotide
  misc_feature (1)..(23): combination of 2'-fluoro, 2'-O-methyl, phosphorothioate linked ribonucleotides
aggcaucuaauauuccaggacuu

SEQ ID NO: 3339 - RNA, 23 nt, Artificial Sequence
  synthetic polynucleotide
  misc_feature (1)..(23): combination of 2'-fluoro, 2'-O-methyl, phosphorothioate linked ribonucleotides
agcaucuaauauuccaggacauu

SEQ ID NO: 3340 - RNA, 23 nt, Artificial Sequence
  synthetic polynucleotide
  misc_feature (1)..(23): combination of 2'-fluoro, 2'-O-methyl, phosphorothioate linked ribonucleotides
auucaucagaucuuagaguuauu

SEQ ID NO: 3341 - RNA, 23 nt, Artificial Sequence
  synthetic polynucleotide
  misc_feature (1)..(23): combination of 2'-fluoro, 2'-O-methyl, phosphorothioate linked ribonucleotides
acaucuggaacaagccaucacuu

SEQ ID NO: 3342 - RNA, 23 nt, Artificial Sequence
  synthetic polynucleotide
  misc_feature (1)..(23): combination of 2'-fluoro, 2'-O-methyl, phosphorothioate linked ribonucleotides
acaagaauccucugcauagacuu

SEQ ID NO: 3343 - RNA, 23 nt, Artificial Sequence
  synthetic polynucleotide
  misc_feature (1)..(23): combination of 2'-fluoro, 2'-O-methyl, phosphorothioate linked ribonucleotides
agcugcacugagagucaggguuu

SEQ ID NO: 3344 - RNA, 23 nt, Artificial Sequence
  synthetic polynucleotide
  misc_feature (1)..(23): combination of 2'-fluoro, 2'-O-methyl, phosphorothioate linked ribonucleotides
aguagguccuuuguguaggcuuu

SEQ ID NO: 3345 - RNA, 23 nt, Artificial Sequence
  synthetic polynucleotide
  misc_feature (1)..(23): combination of 2'-fluoro, 2'-O-methyl, phosphorothioate linked ribonucleotides
augcaagucugcgcucuugguuu

SEQ ID NO: 3346 - RNA, 23 nt, Artificial Sequence
  synthetic polynucleotide
  misc_feature (1)..(23): combination of 2'-fluoro, 2'-O-methyl, phosphorothioate linked ribonucleotides
aguguuuccagcgguuccuucuu

SEQ ID NO: 3347 - RNA, 23 nt, Artificial Sequence
  synthetic polynucleotide
  misc_feature (1)..(23): combination of 2'-fluoro, 2'-O-methyl, phosphorothioate linked ribonucleotides
aggcuugagaagaaaagggaauu

SEQ ID NO: 3348 - RNA, 23 nt, Artificial Sequence
  synthetic polynucleotide
  misc_feature (1)..(23): combination of 2'-fluoro, 2'-O-methyl, phosphorothioate linked ribonucleotides
auaacgagugguagugacagguu

SEQ ID NO: 3349 - RNA, 23 nt, Artificial Sequence
  synthetic polynucleotide
  misc_feature (1)..(23): combination of 2'-fluoro, 2'-O-methyl, phosphorothioate linked ribonucleotides
acgcgaggaggacaaagcgcguu

SEQ ID NO: 3350 - RNA, 23 nt, Artificial Sequence
  synthetic polynucleotide
  misc_feature (1)..(23): combination of 2'-fluoro, 2'-O-methyl, phosphorothioate linked ribonucleotides
agcgagcaguaaccauguuucuu

SEQ ID NO: 3351 - RNA, 23 nt, Artificial Sequence
  synthetic polynucleotide
  misc_feature (1)..(23): combination of 2'-fluoro, 2'-O-methyl, phosphorothioate linked ribonucleotides
aauugcgcgaggaggacaaaguu

SEQ ID NO: 3352 - RNA, 23 nt, Artificial Sequence
  synthetic polynucleotide
  misc_feature (1)..(23): combination of 2'-fluoro, 2'-O-methyl, phosphorothioate linked ribonucleotides
aggucaccucagucuuuaugcuu

SEQ ID NO: 3353 - RNA, 23 nt, Artificial Sequence
  synthetic polynucleotide
  misc_feature (1)..(23): combination of 2'-fluoro, 2'-O-methyl, phosphorothioate linked ribonucleotides
agauugcgcgaggaggacaaauu

SEQ ID NO: 3354 - RNA, 23 nt, Artificial Sequence
  synthetic polynucleotide
  misc_feature (1)..(23): combination of 2'-fluoro, 2'-O-methyl, phosphorothioate linked ribonucleotides
aaacaagccaucacccuuuucuu

SEQ ID NO: 3355 - RNA, 23 nt, Artificial Sequence
  synthetic polynucleotide
  misc_feature (1)..(23): combination of 2'-fluoro, 2'-O-methyl, phosphorothioate linked ribonucleotides
agaacaagccaucacccuuuuuu

SEQ ID NO: 3356 - RNA, 23 nt, Artificial Sequence
  synthetic polynucleotide
  misc_feature (1)..(23): combination of 2'-fluoro, 2'-O-methyl, phosphorothioate linked ribonucleotides
aggcguuuugauaggcaguaguu

SEQ ID NO: 3357 - RNA, 23 nt, Artificial Sequence
  synthetic polynucleotide
  misc_feature (1)..(23): combination of 2'-fluoro, 2'-O-methyl, phosphorothioate linked ribonucleotides
acaagucugcuauuugaugaguu

SEQ ID NO: 3358 - RNA, 23 nt, Artificial Sequence
  synthetic polynucleotide
  misc_feature (1)..(23): combination of 2'-fluoro, 2'-O-methyl, phosphorothioate linked ribonucleotides
aucaagaaugggcuggugucuuu

SEQ ID NO: 3359 - RNA, 23 nt, Artificial Sequence
  synthetic polynucleotide
  misc_feature (1)..(23): combination of 2'-fluoro, 2'-O-methyl, phosphorothioate linked ribonucleotides
aaaaggaucaagaaugggcuguu

SEQ ID NO: 3360 - RNA, 23 nt, Artificial Sequence
  synthetic polynucleotide
  misc_feature (1)..(23): combination of 2'-fluoro, 2'-O-methyl, phosphorothioate linked ribonucleotides
aucaucccaagaauccucugcuu

SEQ ID NO: 3361 - RNA, 23 nt, Artificial Sequence
  synthetic polynucleotide
  misc_feature (1)..(23): combination of 2'-fluoro, 2'-O-methyl, phosphorothioate linked ribonucleotides
aauccuccugagcaccuuuaguu

SEQ ID NO: 3362 - RNA, 23 nt, Artificial Sequence
  synthetic polynucleotide
  misc_feature (1)..(23): combination of 2'-fluoro, 2'-O-methyl, phosphorothioate linked ribonucleotides
uaaacaacugacauaugcuuuuu

SEQ ID NO: 3363 - RNA, 23 nt, Artificial Sequence
  synthetic polynucleotide
  misc_feature (1)..(23): combination of 2'-fluoro, 2'-O-methyl, phosphorothioate linked ribonucleotides
uagaguuauacaaucaguuaauu

SEQ ID NO: 3364 - RNA, 23 nt, Artificial Sequence
  synthetic polynucleotide
  misc_feature (1)..(23): combination of 2'-fluoro, 2'-O-methyl, phosphorothioate linked ribonucleotides
uuagaguuauacaaucaguuauu

SEQ ID NO: 3365 - RNA, 23 nt, Artificial Sequence
  synthetic polynucleotide
  misc_feature (1)..(23): combination of 2'-fluoro, 2'-O-methyl, phosphorothioate linked ribonucleotides
aaguuaaacggggaguuuucauu

SEQ ID NO: 3366 - RNA, 23 nt, Artificial Sequence
  synthetic polynucleotide
  misc_feature (1)..(23): combination of 2'-fluoro, 2'-O-methyl, phosphorothioate linked ribonucleotides
agaacauuuuuaaaaggcaucuu

SEQ ID NO: 3367 - RNA, 23 nt, Artificial Sequence
  synthetic polynucleotide
  misc_feature (1)..(23): combination of 2'-fluoro, 2'-O-methyl, phosphorothioate linked ribonucleotides
uuuuucaaguuuagucaacuuuu

SEQ ID NO: 3368 - RNA, 23 nt, Artificial Sequence
  synthetic polynucleotide
  misc_feature (1)..(23): combination of 2'-fluoro, 2'-O-methyl, phosphorothioate linked ribonucleotides
agcaguaguagguccuuuguguu

SEQ ID NO: 3369 - RNA, 23 nt, Artificial Sequence
  synthetic polynucleotide
  misc_feature (1)..(23): combination of 2'-fluoro, 2'-O-methyl, phosphorothioate linked ribonucleotides
aagacgaaaaaugugaaaaucuu

SEQ ID NO: 3370 - RNA, 23 nt, Artificial Sequence
  synthetic polynucleotide
  misc_feature (1)..(23): combination of 2'-fluoro, 2'-O-methyl, phosphorothioate linked ribonucleotides
aucagaaaggaucaagaaugguu

SEQ ID NO: 3371 - RNA, 23 nt, Artificial Sequence
  synthetic polynucleotide
  misc_feature (1)..(23): combination of 2'-fluoro, 2'-O-methyl, phosphorothioate linked ribonucleotides
uuuaaaaggcaucuaauauucuu

SEQ ID NO: 3372 - RNA, 23 nt, Artificial Sequence
  synthetic polynucleotide
  misc_feature (1)..(23): combination of 2'-fluoro, 2'-O-methyl, phosphorothioate linked ribonucleotides
aaacugacauaugcuuuccuuuu

SEQ ID NO: 3373 - RNA, 23 nt, Artificial Sequence
  synthetic polynucleotide
  misc_feature (1)..(23): combination of 2'-fluoro, 2'-O-methyl, phosphorothioate linked ribonucleotides
acaacugacauaugcuuuccuuu

SEQ ID NO: 3374 - RNA, 23 nt, Artificial Sequence
  synthetic polynucleotide
  misc_feature (1)..(23): combination of 2'-fluoro, 2'-O-methyl, phosphorothioate linked ribonucleotides
uccauaaucaguuaaacgggguu

SEQ ID NO: 3375 - RNA, 23 nt, Artificial Sequence
  synthetic polynucleotide
  misc_feature (1)..(23): combination of 2'-fluoro, 2'-O-methyl, phosphorothioate linked ribonucleotides
aacaacugacauaugcuuuccuu

SEQ ID NO: 3376 - RNA, 23 nt, Artificial Sequence
  synthetic polynucleotide
  misc_feature (1)..(23): combination of 2'-fluoro, 2'-O-methyl, phosphorothioate linked ribonucleotides
auaaucaaaggacaaaauggcuu

SEQ ID NO: 3377 - RNA, 23 nt, Artificial Sequence
  synthetic polynucleotide
  misc_feature (1)..(23): combination of 2'-fluoro, 2'-O-methyl, phosphorothioate linked ribonucleotides
acaugcuucaaguguugucauuu

SEQ ID NO: 3378 - RNA, 23 nt, Artificial Sequence
  synthetic polynucleotide
  misc_feature (1)..(23): combination of 2'-fluoro, 2'-O-methyl, phosphorothioate linked ribonucleotides
agauaaacggagaagcaggaguu

SEQ ID NO: 3379 - RNA, 23 nt, Artificial Sequence
  synthetic polynucleotide
  misc_feature (1)..(23): combination of 2'-fluoro, 2'-O-methyl, phosphorothioate linked ribonucleotides
uagugacaggaugcaagucuguu

SEQ ID NO: 3380 - RNA, 23 nt, Artificial Sequence
  synthetic polynucleotide
  misc_feature (1)..(23): combination of 2'-fluoro, 2'-O-methyl, phosphorothioate linked ribonucleotides
agcaguaaccauguuucccucuu

SEQ ID NO: 3381 - RNA, 23 nt, Artificial Sequence
  synthetic polynucleotide
  misc_feature (1)..(23): combination of 2'-fluoro, 2'-O-methyl, phosphorothioate linked ribonucleotides
aucaccucagucuuuaugccauu

SEQ ID NO: 3382 - RNA, 23 nt, Artificial Sequence
  synthetic polynucleotide
  misc_feature (1)..(23): combination of 2'-fluoro, 2'-O-methyl, phosphorothioate linked ribonucleotides
aggcaauaacacauucuaggauu

SEQ ID NO: 3383 - RNA, 23 nt, Artificial Sequence
  synthetic polynucleotide
  misc_feature (1)..(23): combination of 2'-fluoro, 2'-O-methyl, phosphorothioate linked ribonucleotides
aauaacucuucaguguuuccauu

SEQ ID NO: 3384 - RNA, 23 nt, Artificial Sequence
  synthetic polynucleotide
  misc_feature (1)..(23): combination of 2'-fluoro, 2'-O-methyl, phosphorothioate linked ribonucleotides
ugagcaccuuuaggaaauccauu

SEQ ID NO: 3385 - RNA, 23 nt, Artificial Sequence
  synthetic polynucleotide
  misc_feature (1)..(23): combination of 2'-fluoro, 2'-O-methyl, phosphorothioate linked ribonucleotides
ugaaucacuuuucuucuccucuu

SEQ ID NO: 3386 - RNA, 23 nt, Artificial Sequence
  synthetic polynucleotide
  misc_feature (1)..(23): combination of 2'-fluoro, 2'-O-methyl, phosphorothioate linked ribonucleotides
uuuugauaggcaguaguagguuu

SEQ ID NO: 3387 - RNA, 23 nt, Artificial Sequence
  synthetic polynucleotide
  misc_feature (1)..(23): combination of 2'-fluoro, 2'-O-methyl, phosphorothioate linked ribonucleotides
acguuuugauaggcaguaguauu

SEQ ID NO: 3388 - RNA, 23 nt, Artificial Sequence
  synthetic polynucleotide
  misc_feature (1)..(23): combination of 2'-fluoro, 2'-O-methyl, phosphorothioate linked ribonucleotides
uaaguuauugagacuauauuuuu

SEQ ID NO: 3389 - RNA, 23 nt, Artificial Sequence
  synthetic polynucleotide
  misc_feature (1)..(23): combination of 2'-fluoro, 2'-O-methyl, phosphorothioate linked ribonucleotides
acuucaucagaucuuagaguuuu

SEQ ID NO: 3390 - RNA, 23 nt, Artificial Sequence
  synthetic polynucleotide
  misc_feature (1)..(23): combination of 2'-fluoro, 2'-O-methyl, phosphorothioate linked ribonucleotides
aucacacuggcgauaacucuuuu

SEQ ID NO: 3391 - RNA, 23 nt, Artificial Sequence
  synthetic polynucleotide
  misc_feature (1)..(23): combination of 2'-fluoro, 2'-O-methyl, phosphorothioate linked ribonucleotides
acauuucaaaagcuagcccgguu

SEQ ID NO: 3392 - RNA, 23 nt, Artificial Sequence
  synthetic polynucleotide
  misc_feature (1)..(23): combination of 2'-fluoro, 2'-O-methyl, phosphorothioate linked ribonucleotides
aguggugauuuuccauauaacuu

SEQ ID NO: 3393 - RNA, 23 nt, Artificial Sequence
  synthetic polynucleotide
  misc_feature (1)..(23): combination of 2'-fluoro, 2'-O-methyl, phosphorothioate linked ribonucleotides
augaaaucacugaaucacuuuuu

SEQ ID NO: 3394 - RNA, 23 nt, Artificial Sequence
  synthetic polynucleotide
  misc_feature (1)..(23): combination of 2'-fluoro, 2'-O-methyl, phosphorothioate linked ribonucleotides
aaucuaauauuccaggacauauu

SEQ ID NO: 3395 - RNA, 23 nt, Artificial Sequence
  synthetic polynucleotide
  misc_feature (1)..(23): combination of 2'-fluoro, 2'-O-methyl, phosphorothioate linked ribonucleotides
uucaucagaucuuagaguuauuu

SEQ ID NO: 3396 - RNA, 23 nt, Artificial Sequence
  synthetic polynucleotide
  misc_feature (1)..(23): combination of 2'-fluoro, 2'-O-methyl, phosphorothioate linked ribonucleotides
uuaaaaugcaucuggaacaaguu

SEQ ID NO: 3397 - RNA, 23 nt, Artificial Sequence
  synthetic polynucleotide
  misc_feature (1)..(23): combination of 2'-fluoro, 2'-O-methyl, phosphorothioate linked ribonucleotides
ucaaaggacaaaauggcaauauu

SEQ ID NO: 3398 - RNA, 23 nt, Artificial Sequence
  synthetic polynucleotide
  misc_feature (1)..(23): combination of 2'-fluoro, 2'-O-methyl, phosphorothioate linked ribonucleotides
agacgaaaaaugugaaaaucauu

SEQ ID NO: 3399 - RNA, 23 nt, Artificial Sequence
  synthetic polynucleotide
  misc_feature (1)..(23): combination of 2'-fluoro, 2'-O-methyl, phosphorothioate linked ribonucleotides
agaugcaagucugcgcucuuguu

SEQ ID NO: 3400 - RNA, 23 nt, Artificial Sequence
  synthetic polynucleotide
  misc_feature (1)..(23): combination of 2'-fluoro, 2'-O-methyl, phosphorothioate linked ribonucleotides
agguuuucaguagucuaucuguu

SEQ ID NO: 3401 - RNA, 23 nt, Artificial Sequence
  synthetic polynucleotide
  misc_feature (1)..(23): combination of 2'-fluoro, 2'-O-methyl, phosphorothioate linked ribonucleotides
agagaaagaacuauuccauaauu

SEQ ID NO: 3402 - RNA, 23 nt, Artificial Sequence
  synthetic polynucleotide
  misc_feature (1)..(23): combination of 2'-fluoro, 2'-O-methyl, phosphorothioate linked ribonucleotides
ucucaguucugaaacaccauguu

SEQ ID NO: 3403 - RNA, 23 nt, Artificial Sequence
  synthetic polynucleotide
  misc_feature (1)..(23): combination of 2'-fluoro, 2'-O-methyl, phosphorothioate linked ribonucleotides
aucacugaaucacuuuucuucuu

SEQ ID NO: 3404 - RNA, 23 nt, Artificial Sequence
  synthetic polynucleotide
  misc_feature (1)..(23): combination of 2'-fluoro, 2'-O-methyl, phosphorothioate linked ribonucleotides
auuuacuuuuugcacugggacuu

SEQ ID NO: 3405 - RNA, 23 nt, Artificial Sequence
  synthetic polynucleotide
  misc_feature (1)..(23): combination of 2'-fluoro, 2'-O-methyl, phosphorothioate linked ribonucleotides
ucuuagaguuauacaaucaguuu

SEQ ID NO: 3406 - RNA, 23 nt, Artificial Sequence
  synthetic polynucleotide
  misc_feature (1)..(23): combination of 2'-fluoro, 2'-O-methyl, phosphorothioate linked ribonucleotides
uaauauuccaggacauacgguuu

SEQ ID NO: 3407 - RNA, 23 nt, Artificial Sequence
  synthetic polynucleotide
  misc_feature (1)..(23): combination of 2'-fluoro, 2'-O-methyl, phosphorothioate linked ribonucleotides
acauaaucaguuaaacggggauu

SEQ ID NO: 3408 - RNA, 23 nt, Artificial Sequence
  synthetic polynucleotide
  misc_feature (1)..(23): combination of 2'-fluoro, 2'-O-methyl, phosphorothioate linked ribonucleotides
acuaaguuauugagacuauauuu

SEQ ID NO: 3409 - RNA, 23 nt, Artificial Sequence
  synthetic polynucleotide
  misc_feature (1)..(23): combination of 2'-fluoro, 2'-O-methyl, phosphorothioate linked ribonucleotides
ucuuuacuuuuugcacugggauu

SEQ ID NO: 3410 - RNA, 21 nt, Artificial Sequence
  synthetic polynucleotide
  misc_feature (1)..(21): combination of 2'-fluoro, 2'-O-methyl, phosphorothioate linked ribonucleotides
aacugggacauugaagcauuu

SEQ ID NO: 3411 - RNA, 21 nt, Artificial Sequence
  synthetic polynucleotide
  misc_feature (1)..(21): combination of 2'-fluoro, 2'-O-methyl, phosphorothioate linked ribonucleotides
uuccauauaacuuucguucuu

SEQ ID NO: 3412 - RNA, 21 nt, Artificial Sequence
  synthetic polynucleotide
  misc_feature (1)..(21): combination of 2'-fluoro, 2'-O-methyl, phosphorothioate linked ribonucleotides
agugucugaguaagcaaucuu

SEQ ID NO: 3413 - RNA, 23 nt, Artificial Sequence
  synthetic polynucleotide
  misc_feature (1)..(23): combination of 2'-fluoro, 2'-O-methyl, phosphorothioate linked ribonucleotides
auuacaauauugggccugaaguu

SEQ ID NO: 3414 - RNA, 23 nt, Artificial Sequence
  synthetic polynucleotide
  misc_feature (1)..(23): combination of 2'-fluoro, 2'-O-methyl, phosphorothioate linked ribonucleotides
aacugggacauugaagcauuguu

SEQ ID NO: 3415 - RNA, 23 nt, Artificial Sequence
  synthetic polynucleotide
  misc_feature (1)..(23): combination of 2'-fluoro, 2'-O-methyl, phosphorothioate linked ribonucleotides
uuccauauaacuuucguucuguu

SEQ ID NO: 3416 - RNA, 23 nt, Artificial Sequence
  synthetic polynucleotide
  misc_feature (1)..(23): combination of 2'-fluoro, 2'-O-methyl, phosphorothioate linked ribonucleotides
uuucaaguuuagucaacuuccuu

SEQ ID NO: 3417 - RNA, 23 nt, Artificial Sequence
  synthetic polynucleotide
  misc_feature (1)..(23): combination of 2'-fluoro, 2'-O-methyl, phosphorothioate linked ribonucleotides
aggaagcugguuauccacugguu

SEQ ID NO: 3418 - RNA, 23 nt, Artificial Sequence
  synthetic polynucleotide
  misc_feature (1)..(23): combination of 2'-fluoro, 2'-O-methyl, phosphorothioate linked ribonucleotides
auauacuucaucagaucuuaguu

SEQ ID NO: 3419 - RNA, 23 nt, Artificial Sequence
  synthetic polynucleotide
  misc_feature (1)..(23): combination of 2'-fluoro, 2'-O-methyl, phosphorothioate linked ribonucleotides
agugucugaguaagcaaucuguu

SEQ ID NO: 3420 - RNA, 23 nt, Artificial Sequence
  synthetic polynucleotide
  misc_feature (1)..(23): combination of 2'-fluoro, 2'-O-methyl, phosphorothioate linked ribonucleotides
auuacaauauugggccugaagug

SEQ ID NO: 3421 - RNA, 23 nt, Artificial Sequence
  synthetic polynucleotide
  misc_feature (1)..(23): combination of 2'-fluoro, 2'-O-methyl, phosphorothioate linked ribonucleotides
aacugggacauugaagcauugug

SEQ ID NO: 3422 - RNA, 23 nt, Artificial Sequence
  synthetic polynucleotide
  misc_feature (1)..(23): combination of 2'-fluoro, 2'-O-methyl, phosphorothioate linked ribonucleotides
uuccauauaacuuucguucugug

SEQ ID NO: 3423 - RNA, 23 nt, Artificial Sequence
  synthetic polynucleotide
  misc_feature (1)..(23): combination of 2'-fluoro, 2'-O-methyl, phosphorothioate linked ribonucleotides
uuucaaguuuagucaacuuccug

SEQ ID NO: 3424 - RNA, 23 nt, Artificial Sequence
  synthetic polynucleotide
  misc_feature (1)..(23): combination of 2'-fluoro, 2'-O-methyl, phosphorothioate linked ribonucleotides
aggaagcugguuauccacuggug

SEQ ID NO: 3425 - RNA, 23 nt, Artificial Sequence
  synthetic polynucleotide
  misc_feature (1)..(23): combination of 2'-fluoro, 2'-O-methyl, phosphorothioate linked ribonucleotides
auauacuucaucagaucuuagug

SEQ ID NO: 3426 - RNA, 23 nt, Artificial Sequence
  synthetic polynucleotide
  misc_feature (1)..(23): combination of 2'-fluoro, 2'-O-methyl, phosphorothioate linked ribonucleotides
agugucugaguaagcaaucugug

SEQ ID NO: 3427 - RNA, 23 nt, Artificial Sequence
  synthetic polynucleotide
  misc_feature (1)..(23): combination of 2'-fluoro, 2'-O-methyl, phosphorothioate linked ribonucleotides
aacugggacauugaagcauugag

SEQ ID NO: 3428 - RNA, 23 nt, Artificial Sequence
  synthetic polynucleotide
  misc_feature (1)..(23): combination of 2'-fluoro, 2'-O-methyl, phosphorothioate linked ribonucleotides
aacugggacauugaagcauuguu

SEQ ID NO: 3429 - RNA, 23 nt, Artificial Sequence
  synthetic polynucleotide
  misc_feature (1)..(23): combination of 2'-fluoro, 2'-O-methyl, phosphorothioate linked ribonucleotides
aacugggacauugaagcauuguu

SEQ ID NO: 3430 - RNA, 23 nt, Artificial Sequence
  synthetic polynucleotide
  misc_feature (1)..(23): combination of 2'-fluoro, 2'-O-methyl, phosphorothioate linked ribonucleotides
aacugggacauugaagcauuguu

SEQ ID NO: 3431 - RNA, 23 nt, Artificial Sequence
  synthetic polynucleotide
  misc_feature (1)..(23): combination of 2'-fluoro, 2'-O-methyl, phosphorothioate linked ribonucleotides
aacugggacauugaagcauuguu

SEQ ID NO: 3432 - RNA, 23 nt, Artificial Sequence
  synthetic polynucleotide
  misc_feature (1)..(23): combination of 2'-fluoro, 2'-O-methyl, phosphorothioate linked ribonucleotides
aacugggacauugaagcauuguu

SEQ ID NO: 3433 - RNA, 21 nt, Artificial Sequence
  synthetic polynucleotide
  misc_feature (1)..(21): combination of 2'-fluoro, 2'-O-methyl, phosphorothioate linked ribonucleotides
auuacaauauugggccugaag

SEQ ID NO: 3434 - RNA, 21 nt, Artificial Sequence
  synthetic polynucleotide
  misc_feature (1)..(21): combination of 2'-fluoro, 2'-O-methyl, phosphorothioate linked ribonucleotides
aacugggacauugaagcauug

SEQ ID NO: 3435 - RNA, 21 nt, Artificial Sequence
  synthetic polynucleotide
  misc_feature (1)..(21): combination of 2'-fluoro, 2'-O-methyl, phosphorothioate linked ribonucleotides
uuccauauaacuuucguucug

SEQ ID NO: 3436 - RNA, 21 nt, Artificial Sequence
  synthetic polynucleotide
  misc_feature (1)..(21): combination of 2'-fluoro, 2'-O-methyl, phosphorothioate linked ribonucleotides
uuucaaguuuagucaacuucc

SEQ ID NO: 3437 - RNA, 21 nt, Artificial Sequence
  synthetic polynucleotide
  misc_feature (1)..(21): combination of 2'-fluoro, 2'-O-methyl, phosphorothioate linked ribonucleotides
aggaagcugguuauccacugg

SEQ ID NO: 3438 - RNA, 21 nt, Artificial Sequence
  synthetic polynucleotide
  misc_feature (1)..(21): combination of 2'-fluoro, 2'-O-methyl, phosphorothioate linked ribonucleotides
auauacuucaucagaucuuag

SEQ ID NO: 3439 - RNA, 21 nt, Artificial Sequence
  synthetic polynucleotide
  misc_feature (1)..(21): combination of 2'-fluoro, 2'-O-methyl, phosphorothioate linked ribonucleotides
agugucugaguaagcaaucug

SEQ ID NO: 3440 - RNA, 21 nt, Artificial Sequence
  synthetic polynucleotide
  misc_feature (1)..(21): combination of 2'-fluoro, 2'-O-methyl, phosphorothioate linked ribonucleotides
augggacauugaagcauuguu

SEQ ID NO: 3441 - RNA, 21 nt, Artificial Sequence
  synthetic polynucleotide
  misc_feature (1)..(21): combination of 2'-fluoro, 2'-O-methyl, phosphorothioate linked ribonucleotides
uagauauuggguuuuaaacuu

SEQ ID NO: 3442 - RNA, 21 nt, Artificial Sequence
  synthetic polynucleotide
  misc_feature (1)..(21): combination of 2'-fluoro, 2'-O-methyl, phosphorothioate linked ribonucleotides
uugcacugggacauugaaguu

SEQ ID NO: 3443 - RNA, 21 nt, Artificial Sequence
  synthetic polynucleotide
  misc_feature (1)..(21): combination of 2'-fluoro, 2'-O-methyl, phosphorothioate linked ribonucleotides
aggaaauccaaugcugucuuu

SEQ ID NO: 3444 - RNA, 21 nt, Artificial Sequence
  synthetic polynucleotide
  misc_feature (1)..(21): combination of 2'-fluoro, 2'-O-methyl, phosphorothioate linked ribonucleotides
acaaagaguggugauuuucuu

SEQ ID NO: 3445 - RNA, 21 nt, Artificial Sequence
  synthetic polynucleotide
  misc_feature (1)..(21): combination of 2'-fluoro, 2'-O-methyl, phosphorothioate linked ribonucleotides
uuaggaaauccaaugcuguuu

SEQ ID NO: 3446 - RNA, 21 nt, Artificial Sequence
  synthetic polynucleotide
  misc_feature (1)..(21): combination of 2'-fluoro, 2'-O-methyl, phosphorothioate linked ribonucleotides
agggaguuuucagaauccuuu

SEQ ID NO: 3447 - RNA, 21 nt, Artificial Sequence
  synthetic polynucleotide
  misc_feature (1)..(21): combination of 2'-fluoro, 2'-O-methyl, phosphorothioate linked ribonucleotides
aaccaugcuucaaguguuguu

SEQ ID NO: 3448 - RNA, 23 nt, Artificial Sequence
  synthetic polynucleotide
  misc_feature (1)..(23): combination of 2'-fluoro, 2'-O-methyl, phosphorothioate linked ribonucleotides
augggacauugaagcauugaguu

SEQ ID NO: 3449 - RNA, 23 nt, Artificial Sequence
  synthetic polynucleotide
  misc_feature (1)..(23): combination of 2'-fluoro, 2'-O-methyl, phosphorothioate linked ribonucleotides
uagauauuggguuuuaaacaauu

SEQ ID NO: 3450 - RNA, 23 nt, Artificial Sequence
  synthetic polynucleotide
  misc_feature (1)..(23): combination of 2'-fluoro, 2'-O-methyl, phosphorothioate linked ribonucleotides
uugcacugggacauugaagcauu

SEQ ID NO: 3451 - RNA, 23 nt, Artificial Sequence
  synthetic polynucleotide
  misc_feature (1)..(23): combination of 2'-fluoro, 2'-O-methyl, phosphorothioate linked ribonucleotides
aggaaauccaaugcugucugauu

SEQ ID NO: 3452 - RNA, 23 nt, Artificial Sequence
  synthetic polynucleotide
  misc_feature (1)..(23): combination of 2'-fluoro, 2'-O-methyl, phosphorothioate linked ribonucleotides
acaaagaguggugauuuuccauu

SEQ ID NO: 3453 - RNA, 23 nt, Artificial Sequence
  synthetic polynucleotide
  misc_feature (1)..(23): combination of 2'-fluoro, 2'-O-methyl, phosphorothioate linked ribonucleotides
uuaggaaauccaaugcugucuuu

SEQ ID NO: 3454 - RNA, 23 nt, Artificial Sequence
  synthetic polynucleotide
  misc_feature (1)..(23): combination of 2'-fluoro, 2'-O-methyl, phosphorothioate linked ribonucleotides
agggaguuuucagaauccuguuu

SEQ ID NO: 3455 - RNA, 23 nt, Artificial Sequence
  synthetic polynucleotide
  misc_feature (1)..(23): combination of 2'-fluoro, 2'-O-methyl, phosphorothioate linked ribonucleotides
aaccaugcuucaaguguugucuu

SEQ ID NO: 3456 - RNA, 21 nt, Artificial Sequence
  synthetic polynucleotide
  misc_feature (1)..(21): combination of 2'-fluoro, 2'-O-methyl, phosphorothioate linked ribonucleotides
augggacauugaagcauugag

SEQ ID NO: 3457 - RNA, 21 nt, Artificial Sequence
  synthetic polynucleotide
  misc_feature (1)..(21): combination of 2'-fluoro, 2'-O-methyl, phosphorothioate linked ribonucleotides
uagauauuggguuuuaaacaa

SEQ ID NO: 3458 - RNA, 21 nt, Artificial Sequence
  synthetic polynucleotide
  misc_feature (1)..(21): combination of 2'-fluoro, 2'-O-methyl, phosphorothioate linked ribonucleotides
uugcacugggacauugaagca

SEQ ID NO: 3459 - RNA, 21 nt, Artificial Sequence
  synthetic polynucleotide
  misc_feature (1)..(21): combination of 2'-fluoro, 2'-O-methyl, phosphorothioate linked ribonucleotides
aggaaauccaaugcugucuga

SEQ ID NO: 3460 - RNA, 21 nt, Artificial Sequence
  synthetic polynucleotide
  misc_feature (1)..(21): combination of 2'-fluoro, 2'-O-methyl, phosphorothioate linked ribonucleotides
acaaagaguggugauuuucca

SEQ ID NO: 3461 - RNA, 21 nt, Artificial Sequence
  synthetic polynucleotide
  misc_feature (1)..(21): combination of 2'-fluoro, 2'-O-methyl, phosphorothioate linked ribonucleotides
uuaggaaauccaaugcugucu

SEQ ID NO: 3462 - RNA, 21 nt, Artificial Sequence
  synthetic polynucleotide
  misc_feature (1)..(21): combination of 2'-fluoro, 2'-O-methyl, phosphorothioate linked ribonucleotides
agggaguuuucagaauccugu

SEQ ID NO: 3463 - RNA, 21 nt, Artificial Sequence
  synthetic polynucleotide
  misc_feature (1)..(21): combination of 2'-fluoro, 2'-O-methyl, phosphorothioate linked ribonucleotides
aaccaugcuucaaguguuguc

SEQ ID NO: 3464 - RNA, 23 nt, Artificial Sequence
  synthetic polynucleotide
  misc_feature (1)..(23): combination of 2'-fluoro, 2'-O-methyl, phosphorothioate linked ribonucleotides
uagauauuggguuuuaaacaguu

SEQ ID NO: 3465 - RNA, 23 nt, Artificial Sequence
  synthetic polynucleotide
  misc_feature (1)..(23): combination of 2'-fluoro, 2'-O-methyl, phosphorothioate linked ribonucleotides
uugcacugggacauugaagcguu

SEQ ID NO: 3466 - RNA, 23 nt, Artificial Sequence
  synthetic polynucleotide
  misc_feature (1)..(23): combination of 2'-fluoro, 2'-O-methyl, phosphorothioate linked ribonucleotides
aggaaauccaaugcugucugguu

SEQ ID NO: 3467 - RNA, 23 nt, Artificial Sequence
  synthetic polynucleotide
  misc_feature (1)..(23): combination of 2'-fluoro, 2'-O-methyl, phosphorothioate linked ribonucleotides
acaaagaguggugauuuuccguu

SEQ ID NO: 3468 - RNA, 23 nt, Artificial Sequence
  synthetic polynucleotide
  misc_feature (1)..(23): combination of 2'-fluoro, 2'-O-methyl, phosphorothioate linked ribonucleotides
uuaggaaauccaaugcuguccuu

SEQ ID NO: 3469 - RNA, 23 nt, Artificial Sequence
  synthetic polynucleotide
  misc_feature (1)..(23): combination of 2'-fluoro, 2'-O-methyl, phosphorothioate linked ribonucleotides
agggaguuuucagaauccugcuu

SEQ ID NO: 3470 - RNA, 21 nt, Artificial Sequence
  synthetic polynucleotide
  misc_feature (1)..(21): combination of 2'-fluoro, 2'-O-methyl, phosphorothioate linked ribonucleotides
acaucuggaacaagccaucuu

SEQ ID NO: 3471 - RNA, 21 nt, Artificial Sequence
  synthetic polynucleotide
  misc_feature (1)..(21): combination of 2'-fluoro, 2'-O-methyl, phosphorothioate linked ribonucleotides
agcaucuaauauuccaggauu

SEQ ID NO: 3472 - RNA, 21 nt, Artificial Sequence
  synthetic polynucleotide
  misc_feature (1)..(21): combination of 2'-fluoro, 2'-O-methyl, phosphorothioate linked ribonucleotides
aggcaucuaauauuccagguu

SEQ ID NO: 3473 - RNA, 21 nt, Artificial Sequence
  synthetic polynucleotide
  misc_feature (1)..(21): combination of 2'-fluoro, 2'-O-methyl, phosphorothioate linked ribonucleotides
uacuucaucagaucuuagauu

SEQ ID NO: 3474 - RNA, 21 nt, Artificial Sequence
  synthetic polynucleotide
  misc_feature (1)..(21): combination of 2'-fluoro, 2'-O-methyl, phosphorothioate linked ribonucleotides
aaggcaucuaauauuccaguu

SEQ ID NO: 3475 - RNA, 23 nt, Artificial Sequence
  synthetic polynucleotide
  misc_feature (1)..(23): combination of 2'-fluoro, 2'-O-methyl, phosphorothioate linked ribonucleotides
acaucuggaacaagccaucacuu

SEQ ID NO: 3476 - RNA, 23 nt, Artificial Sequence
  synthetic polynucleotide
  misc_feature (1)..(23): combination of 2'-fluoro, 2'-O-methyl, phosphorothioate linked ribonucleotides
agcaucuaauauuccaggacauu

SEQ ID NO: 3477 - RNA, 23 nt, Artificial Sequence
  synthetic polynucleotide
  misc_feature (1)..(23): combination of 2'-fluoro, 2'-O-methyl, phosphorothioate linked ribonucleotides
aggcaucuaauauuccaggacuu

SEQ ID NO: 3478 - RNA, 23 nt, Artificial Sequence
  synthetic polynucleotide
  misc_feature (1)..(23): combination of 2'-fluoro, 2'-O-methyl, phosphorothioate linked ribonucleotides
uacuucaucagaucuuagaguuu

SEQ ID NO: 3479 - RNA, 23 nt, Artificial Sequence
  synthetic polynucleotide
  misc_feature (1)..(23): combination of 2'-fluoro, 2'-O-methyl, phosphorothioate linked ribonucleotides
aaggcaucuaauauuccaggauu

SEQ ID NO: 3480 - RNA, 21 nt, Artificial Sequence
  synthetic polynucleotide
  misc_feature (1)..(21): combination of 2'-fluoro, 2'-O-methyl, phosphorothioate linked ribonucleotides
acaucuggaacaagccaucac

SEQ ID NO: 3481 - RNA, 21 nt, Artificial Sequence
  synthetic polynucleotide
  misc_feature (1)..(21): combination of 2'-fluoro, 2'-O-methyl, phosphorothioate linked ribonucleotides
agcaucuaauauuccaggaca

SEQ ID NO: 3482 - RNA, 21 nt, Artificial Sequence
  synthetic polynucleotide
  misc_feature (1)..(21): combination of 2'-fluoro, 2'-O-methyl, phosphorothioate linked ribonucleotides
aggcaucuaauauuccaggac

SEQ ID NO: 3483 - RNA, 21 nt, Artificial Sequence
  synthetic polynucleotide
  misc_feature (1)..(21): combination of 2'-fluoro, 2'-O-methyl, phosphorothioate linked ribonucleotides
uacuucaucagaucuuagagu

SEQ ID NO: 3484 - RNA, 21 nt, Artificial Sequence
  synthetic polynucleotide
  misc_feature (1)..(21): combination of 2'-fluoro, 2'-O-methyl, phosphorothioate linked ribonucleotides
aaggcaucuaauauuccagga

SEQ ID NO: 3485 - RNA, 23 nt, Artificial Sequence
  synthetic polynucleotide
  misc_feature (1)..(23): combination of 2'-fluoro, 2'-O-methyl, phosphorothioate linked ribonucleotides
aaggcaucuaauauuccaggguu

SEQ ID NO: 3486 - RNA, 23 nt, Artificial Sequence
  synthetic polynucleotide
  misc_feature (1)..(23): combination of 2'-fluoro, 2'-O-methyl, phosphorothioate linked ribonucleotides
uacuucaucagaucuuagagcuu

SEQ ID NO: 3487 - RNA, 23 nt, Artificial Sequence
  synthetic polynucleotide
  misc_feature (1)..(23): combination of 2'-fluoro, 2'-O-methyl, phosphorothioate linked ribonucleotides
agcaucuaauauuccaggacguu

SEQ ID NO: 3488 - RNA, 23 nt, Artificial Sequence
  synthetic polynucleotide
  misc_feature (1)..(23): combination of 2'-fluoro, 2'-O-methyl, phosphorothioate linked ribonucleotides
auucaucagaucuuagaguuguu

SEQ ID NO: 3489 - RNA, 23 nt, Artificial Sequence
  synthetic polynucleotide
  misc_feature (1)..(23): combination of 2'-fluoro, 2'-O-methyl, phosphorothioate linked ribonucleotides
ucacugaaucacuuuucuuccuu

SEQ ID NO: 3490 - RNA, 23 nt, Artificial Sequence
  synthetic polynucleotide
  misc_feature (1)..(23): combination of 2'-fluoro, 2'-O-methyl, phosphorothioate linked ribonucleotides
aggcaucuaauauuccuggacuu

SEQ ID NO: 3491 - RNA, 23 nt, Artificial Sequence
  synthetic polynucleotide
  misc_feature (1)..(23): combination of 2'-fluoro, 2'-O-methyl, phosphorothioate linked ribonucleotides
aggcaucuaauauuccagcacuu

SEQ ID NO: 3492 - RNA, 23 nt, Artificial Sequence
  synthetic polynucleotide
  misc_feature (1)..(23): combination of 2'-fluoro, 2'-O-methyl, phosphorothioate linked ribonucleotides
aaggcaucuaauauucgaggauu

SEQ ID NO: 3493 - RNA, 23 nt, Artificial Sequence
  synthetic polynucleotide
  misc_feature (1)..(23): combination of 2'-fluoro, 2'-O-methyl, phosphorothioate linked ribonucleotides
aaggcaucuaauauuccacgauu

SEQ ID NO: 3494 - RNA, 23 nt, Artificial Sequence
  synthetic polynucleotide
  misc_feature (1)..(23): combination of 2'-fluoro, 2'-O-methyl, phosphorothioate linked ribonucleotides
uacuucaucagaucuuaguguuu

SEQ ID NO: 3495 - RNA, 23 nt, Artificial Sequence
  synthetic polynucleotide
  misc_feature (1)..(23): combination of 2'-fluoro, 2'-O-methyl, phosphorothioate linked ribonucleotides
uacuucaucagaucuuagacuuu

SEQ ID NO: 3496 - RNA, 23 nt, Artificial Sequence
  synthetic polynucleotide
  misc_feature (1)..(23): combination of 2'-fluoro, 2'-O-methyl, phosphorothioate linked ribonucleotides
uuaggaaauccaaugcugacuuu

SEQ ID NO: 3497 - RNA, 23 nt, Artificial Sequence
  synthetic polynucleotide
  misc_feature (1)..(23): combination of 2'-fluoro, 2'-O-methyl, phosphorothioate linked ribonucleotides
uuaggaaauccaaugcuguguuu

SEQ ID NO: 3498 - RNA, 23 nt, Artificial Sequence
  synthetic polynucleotide
  misc_feature (1)..(23): combination of 2'-fluoro, 2'-O-methyl, phosphorothioate linked ribonucleotides
aggcaucuaauauuccaggacuu

SEQ ID NO: 3499 - RNA, 23 nt, Artificial Sequence
  synthetic polynucleotide
  misc_feature (1)..(23): combination of 2'-fluoro, 2'-O-methyl, phosphorothioate linked ribonucleotides
aggcaucuaauauuccaggacuu

SEQ ID NO: 3500 - RNA, 23 nt, Artificial Sequence
  synthetic polynucleotide
  misc_feature (1)..(23): combination of 2'-fluoro, 2'-O-methyl, phosphorothioate linked ribonucleotides
aggcaucuaauauuccaggacuu

SEQ ID NO: 3501 - RNA, 23 nt, Artificial Sequence
  synthetic polynucleotide
  misc_feature (1)..(23): combination of 2'-fluoro, 2'-O-methyl, phosphorothioate linked ribonucleotides
acaucuaauauuccaggacauuu

SEQ ID NO: 3502 - RNA, 23 nt, Artificial Sequence
  synthetic polynucleotide
  misc_feature (1)..(23): combination of 2'-fluoro, 2'-O-methyl, phosphorothioate linked ribonucleotides
ucaucagaucuuagaguuauauu

SEQ ID NO: 3503 - RNA, 23 nt, Artificial Sequence
  synthetic polynucleotide
  misc_feature (1)..(23): combination of 2'-fluoro, 2'-O-methyl, phosphorothioate linked ribonucleotides
aauauacuucaucagaucuuauu

SEQ ID NO: 3504 - RNA, 23 nt, Artificial Sequence
  synthetic polynucleotide
  misc_feature (1)..(23): combination of 2'-fluoro, 2'-O-methyl, phosphorothioate linked ribonucleotides
acauugaagcauugagacaccuu

SEQ ID NO: 3505 - RNA, 23 nt, Artificial Sequence
  synthetic polynucleotide
  misc_feature (1)..(23): combination of 2'-fluoro, 2'-O-methyl, phosphorothioate linked ribonucleotides
aacauugaagcauugagacacuu

SEQ ID NO: 3506 - RNA, 23 nt, Artificial Sequence
  synthetic polynucleotide
  misc_feature (1)..(23): combination of 2'-fluoro, 2'-O-methyl, phosphorothioate linked ribonucleotides
ugggacauugaagcauugagauu

SEQ ID NO: 3507 - RNA, 23 nt, Artificial Sequence
  synthetic polynucleotide
  misc_feature (1)..(23): combination of 2'-fluoro, 2'-O-methyl, phosphorothioate linked ribonucleotides
acacugggacauugaagcauuuu

SEQ ID NO: 3508 - RNA, 23 nt, Artificial Sequence
  synthetic polynucleotide
  misc_feature (1)..(23): combination of 2'-fluoro, 2'-O-methyl, phosphorothioate linked ribonucleotides
ugcacugggacauugaagcauuu

SEQ ID NO: 3509 - RNA, 23 nt, Artificial Sequence
  synthetic polynucleotide
  misc_feature (1)..(23): combination of 2'-fluoro, 2'-O-methyl, phosphorothioate linked ribonucleotides
auucaucagaucuuagaguuauu

SEQ ID NO: 3510 - RNA, 23 nt, Artificial Sequence
  synthetic polynucleotide
  misc_feature (1)..(23): combination of 2'-fluoro, 2'-O-methyl, phosphorothioate linked ribonucleotides
aaggcaucuaauauuccaggauu

SEQ ID NO: 3511 - RNA, 23 nt, Artificial Sequence
  synthetic polynucleotide
  misc_feature (1)..(23): combination of 2'-fluoro, 2'-O-methyl, phosphorothioate linked ribonucleotides
uacuucaucagaucuuagaguuu

SEQ ID NO: 3512 - RNA, 23 nt, Artificial Sequence
  synthetic polynucleotide
  misc_feature (1)..(23): combination of 2'-fluoro, 2'-O-methyl, phosphorothioate linked ribonucleotides
aggcaucuaauauuccaggacuu

SEQ ID NO: 3513 - RNA, 23 nt, Artificial Sequence
  synthetic polynucleotide
  misc_feature (1)..(23): combination of 2'-fluoro, 2'-O-methyl, phosphorothioate linked ribonucleotides
agcaucuaauauuccaggacauu

SEQ ID NO: 3514 - RNA, 23 nt, Artificial Sequence
  synthetic polynucleotide
  misc_feature (1)..(23): combination of 2'-fluoro, 2'-O-methyl, phosphorothioate linked ribonucleotides
auucaucagaucuuagaguuauu

SEQ ID NO: 3515 - RNA, 23 nt, Artificial Sequence
  synthetic polynucleotide
  misc_feature (1)..(23): combination of 2'-fluoro, 2'-O-methyl, phosphorothioate linked ribonucleotides
aaggcaucuaauauuccaggauu

SEQ ID NO: 3516 - RNA, 23 nt, Artificial Sequence
  synthetic polynucleotide
  misc_feature (1)..(23): combination of 2'-fluoro, 2'-O-methyl, phosphorothioate linked ribonucleotides
uacuucaucagaucuuagaguuu

SEQ ID NO: 3517 - RNA, 23 nt, Artificial Sequence
  synthetic polynucleotide
  misc_feature (1)..(23): combination of 2'-fluoro, 2'-O-methyl, phosphorothioate linked ribonucleotides
agcaucuaauauuccaggacauu

SEQ ID NO: 3518 - RNA, 23 nt, Artificial Sequence
  synthetic polynucleotide
  misc_feature (1)..(23): combination of 2'-fluoro, 2'-O-methyl, phosphorothioate linked ribonucleotides
auucaucagaucuuagaguuauu

SEQ ID NO: 3519 - RNA, 23 nt, Artificial Sequence
  synthetic polynucleotide
  misc_feature (1)..(23): combination of 2'-fluoro, 2'-O-methyl, phosphorothioate linked ribonucleotides
aaggcaucuaauauuccaggauu

SEQ ID NO: 3520 - RNA, 23 nt, Artificial Sequence
  synthetic polynucleotide
  misc_feature (1)..(23): combination of 2'-fluoro, 2'-O-methyl, phosphorothioate linked ribonucleotides
uacuucaucagaucuuagaguuu

SEQ ID NO: 3521 - RNA, 23 nt, Artificial Sequence
  synthetic polynucleotide
  misc_feature (1)..(23): combination of 2'-fluoro, 2'-O-methyl, phosphorothioate linked ribonucleotides
agcaucuaauauuccaggacauu

SEQ ID NO: 3522 - RNA, 23 nt, Artificial Sequence
  synthetic polynucleotide
  misc_feature (1)..(23): combination of 2'-fluoro, 2'-O-methyl, phosphorothioate linked ribonucleotides
auucaucagaucuuagaguuauu

SEQ ID NO: 3523 - RNA, 23 nt, Artificial Sequence
  synthetic polynucleotide
  misc_feature (1)..(23): combination of 2'-fluoro, 2'-O-methyl, phosphorothioate linked ribonucleotides
ugcaucuggaacaagccaucauu

SEQ ID NO: 3524 - RNA, 23 nt, Artificial Sequence
  synthetic polynucleotide
  misc_feature (1)..(23): combination of 2'-fluoro, 2'-O-methyl, phosphorothioate linked ribonucleotides
augcaucuggaacaagccaucuu

SEQ ID NO: 3525 - RNA, 23 nt, Artificial Sequence
  synthetic polynucleotide
  misc_feature (1)..(23): combination of 2'-fluoro, 2'-O-methyl, phosphorothioate linked ribonucleotides
agaaauccaaugcugucugaguu

SEQ ID NO: 3526 - RNA, 23 nt, Artificial Sequence
  synthetic polynucleotide
  misc_feature (1)..(23): combination of 2'-fluoro, 2'-O-methyl, phosphorothioate linked ribonucleotides
uaaucaaaggacaaaauggcauu

SEQ ID NO: 3527 - RNA, 23 nt, Artificial Sequence
  synthetic polynucleotide
  misc_feature (1)..(23): combination of 2'-fluoro, 2'-O-methyl, phosphorothioate linked ribonucleotides
uauaaucaaaggacaaaaugguu

SEQ ID NO: 3528 - RNA, 23 nt, Artificial Sequence
  synthetic polynucleotide
  misc_feature (1)..(23): combination of 2'-fluoro, 2'-O-methyl, phosphorothioate linked ribonucleotides
ugcaucuggaacaagccaucauu

SEQ ID NO: 3529 - RNA, 23 nt, Artificial Sequence
  synthetic polynucleotide
  misc_feature (1)..(23): combination of 2'-fluoro, 2'-O-methyl, phosphorothioate linked ribonucleotides
augcaucuggaacaagccaucuu

SEQ ID NO: 3530 - RNA, 23 nt, Artificial Sequence
  synthetic polynucleotide
  misc_feature (1)..(23): combination of 2'-fluoro, 2'-O-methyl, phosphorothioate linked ribonucleotides
agaaauccaaugcugucugaguu

SEQ ID NO: 3531 - RNA, 23 nt, Artificial Sequence
  synthetic polynucleotide
  misc_feature (1)..(23): combination of 2'-fluoro, 2'-O-methyl, phosphorothioate linked ribonucleotides
uaaucaaaggacaaaauggcauu

SEQ ID NO: 3532 - RNA, 23 nt, Artificial Sequence
  synthetic polynucleotide
  misc_feature (1)..(23): combination of 2'-fluoro, 2'-O-methyl, phosphorothioate linked ribonucleotides
uauaaucaaaggacaaaaugguu

SEQ ID NO: 3533 - RNA, 23 nt, Artificial Sequence
  synthetic polynucleotide
  misc_feature (1)..(23): combination of 2'-fluoro, 2'-O-methyl, phosphorothioate linked ribonucleotides
ugcaucuggaacaagccaucauu

SEQ ID NO: 3534 - RNA, 23 nt, Artificial Sequence
  synthetic polynucleotide
  misc_feature (1)..(23): combination of 2'-fluoro, 2'-O-methyl, phosphorothioate linked ribonucleotides
augcaucuggaacaagccaucuu

SEQ ID NO: 3535 - RNA, 23 nt, Artificial Sequence
  synthetic polynucleotide
  misc_feature (1)..(23): combination of 2'-fluoro, 2'-O-methyl, phosphorothioate linked ribonucleotides
agaaauccaaugcugucugaguu

SEQ ID NO: 3536 - RNA, 23 nt, Artificial Sequence
  synthetic polynucleotide
  misc_feature (1)..(23): combination of 2'-fluoro, 2'-O-methyl, phosphorothioate linked ribonucleotides
uaaucaaaggacaaaauggcauu

SEQ ID NO: 3537 - RNA, 23 nt, Artificial Sequence
  synthetic polynucleotide
  misc_feature (1)..(23): combination of 2'-fluoro, 2'-O-methyl, phosphorothioate linked ribonucleotides
uauaaucaaaggacaaaaugguu

SEQ ID NO: 3538 - RNA, 23 nt, Artificial Sequence
  synthetic polynucleotide
  misc_feature (1)..(23): combination of 2'-fluoro, 2'-O-methyl, phosphorothioate linked ribonucleotides
aagacgaaaaaugugaaaaucuu

SEQ ID NO: 3539 - RNA, 23 nt, Artificial Sequence
  synthetic polynucleotide
  misc_feature (1)..(23): combination of 2'-fluoro, 2'-O-methyl, phosphorothioate linked ribonucleotides
uuuaaaaggcaucuaauauucuu

SEQ ID NO: 3540 - RNA, 23 nt, Artificial Sequence
  synthetic polynucleotide
  misc_feature (1)..(23): combination of 2'-fluoro, 2'-O-methyl, phosphorothioate linked ribonucleotides
acaacugacauaugcuuuccuuu

SEQ ID NO: 3541 - RNA, 23 nt, Artificial Sequence
  synthetic polynucleotide
  misc_feature (1)..(23): combination of 2'-fluoro, 2'-O-methyl, phosphorothioate linked ribonucleotides
auaaucaaaggacaaaauggcuu

SEQ ID NO: 3542 - RNA, 21 nt, Artificial Sequence
  synthetic polynucleotide
  misc_feature (1)..(21): combination of 2'-fluoro, 2'-O-methyl, phosphorothioate linked ribonucleotides
aacugggacauugaagcauug

SEQ ID NO: 3543 - RNA, 21 nt, Artificial Sequence
  synthetic polynucleotide
  misc_feature (1)..(21): combination of 2'-fluoro, 2'-O-methyl, phosphorothioate linked ribonucleotides
aacugggacauugaagcauuu

SEQ ID NO: 3544 - RNA, 23 nt, Artificial Sequence
  synthetic polynucleotide
  misc_feature (1)..(23): combination of 2'-fluoro, 2'-O-methyl, phosphorothioate linked ribonucleotides
aacugggacauugaagcauugag

SEQ ID NO: 3545 - RNA, 21 nt, Artificial Sequence
  synthetic polynucleotide
  misc_feature (1)..(21): combination of 2'-fluoro, 2'-O-methyl, phosphorothioate linked ribonucleotides
aacugggacauugaagcauug

SEQ ID NO: 3546 - RNA, 21 nt, Artificial Sequence
  synthetic polynucleotide
  misc_feature (1)..(21): combination of 2'-fluoro, 2'-O-methyl, phosphorothioate linked ribonucleotides
aacugggacauugaagcauuu

SEQ ID NO: 3547 - RNA, 23 nt, Artificial Sequence
  synthetic polynucleotide
  misc_feature (1)..(23): combination of 2'-fluoro, 2'-O-methyl, phosphorothioate linked ribonucleotides
aacugggacauugaagcauugag

SEQ ID NO: 3548 - RNA, 21 nt, Artificial Sequence
  synthetic polynucleotide
  misc_feature (1)..(21): combination of 2'-fluoro, 2'-O-methyl, phosphorothioate linked ribonucleotides
aagacgaaaaaugugaaaauc

SEQ ID NO: 3549 - RNA, 21 nt, Artificial Sequence
  synthetic polynucleotide
  misc_feature (1)..(21): combination of 2'-fluoro, 2'-O-methyl, phosphorothioate linked ribonucleotides
uuuaaaaggcaucuaauauuc

SEQ ID NO: 3550 - RNA, 21 nt, Artificial Sequence
  synthetic polynucleotide
  misc_feature (1)..(21): combination of 2'-fluoro, 2'-O-methyl, phosphorothioate linked ribonucleotides
acaacugacauaugcuuuccu

SEQ ID NO: 3551 - RNA, 21 nt, Artificial Sequence
  synthetic polynucleotide
  misc_feature (1)..(21): combination of 2'-fluoro, 2'-O-methyl, phosphorothioate linked ribonucleotides
auaaucaaaggacaaaauggc

SEQ ID NO: 3552 - RNA, 21 nt, Artificial Sequence
  synthetic polynucleotide
  misc_feature (1)..(21): combination of 2'-fluoro, 2'-O-methyl, phosphorothioate linked ribonucleotides
uaaguuauugagacuauauuu

SEQ ID NO: 3553 - RNA, 21 nt, Artificial Sequence
  synthetic polynucleotide
  misc_feature (1)..(21): combination of 2'-fluoro, 2'-O-methyl, phosphorothioate linked ribonucleotides
ugcaagucugcgcucuuggua

SEQ ID NO: 3554 - RNA, 21 nt, Artificial Sequence
  synthetic polynucleotide
  misc_feature (1)..(21): combination of 2'-fluoro, 2'-O-methyl, phosphorothioate linked ribonucleotides
agaacauuuuuaaaaggcauc

SEQ ID NO: 3555 - RNA, 21 nt, Artificial Sequence
  synthetic polynucleotide
  misc_feature (1)..(21): combination of 2'-fluoro, 2'-O-methyl, phosphorothioate linked ribonucleotides
acaucuaauauuccaggacau

SEQ ID NO: 3556 - RNA, 23 nt, Artificial Sequence
  synthetic polynucleotide
  misc_feature (1)..(23): combination of 2'-fluoro, 2'-O-methyl, phosphorothioate linked ribonucleotides
uaaguuauugagacuauauuuuu

SEQ ID NO: 3557 - RNA, 23 nt, Artificial Sequence
  synthetic polynucleotide
  misc_feature (1)..(23): combination of 2'-fluoro, 2'-O-methyl, phosphorothioate linked ribonucleotides
ugcaagucugcgcucuugguauu

SEQ ID NO: 3558 - RNA, 23 nt, Artificial Sequence
  synthetic polynucleotide
  misc_feature (1)..(23): combination of 2'-fluoro, 2'-O-methyl, phosphorothioate linked ribonucleotides
agaacauuuuuaaaaggcaucuu

SEQ ID NO: 3559 - RNA, 23 nt, Artificial Sequence
  synthetic polynucleotide
  misc_feature (1)..(23): combination of 2'-fluoro, 2'-O-methyl, phosphorothioate linked ribonucleotides
acaucuaauauuccaggacauuu

SEQ ID NO: 3560 - RNA, 21 nt, Artificial Sequence
  synthetic polynucleotide
  misc_feature (1)..(21): combination of 2'-fluoro, 2'-O-methyl, phosphorothioate linked ribonucleotides
aagacgaaaaaugugaaaauu

SEQ ID NO: 3561 - RNA, 21 nt, Artificial Sequence
  synthetic polynucleotide
  misc_feature (1)..(21): combination of 2'-fluoro, 2'-O-methyl, phosphorothioate linked ribonucleotides
uuuaaaaggcaucuaauauuu

SEQ ID NO: 3562 - RNA, 21 nt, Artificial Sequence
  synthetic polynucleotide
  misc_feature (1)..(21): combination of 2'-fluoro, 2'-O-methyl, phosphorothioate linked ribonucleotides
acaacugacauaugcuuucuu

SEQ ID NO: 3563 - RNA, 21 nt, Artificial Sequence
  synthetic polynucleotide
  misc_feature (1)..(21): combination of 2'-fluoro, 2'-O-methyl, phosphorothioate linked ribonucleotides
auaaucaaaggacaaaauguu

SEQ ID NO: 3564 - RNA, 21 nt, Artificial Sequence
  synthetic polynucleotide
  misc_feature (1)..(21): combination of 2'-fluoro, 2'-O-methyl, phosphorothioate linked ribonucleotides
ugcaagucugcgcucuugguu

SEQ ID NO: 3565 - RNA, 21 nt, Artificial Sequence
  synthetic polynucleotide
  misc_feature (1)..(21): combination of 2'-fluoro, 2'-O-methyl, phosphorothioate linked ribonucleotides
agaacauuuuuaaaaggcauu

SEQ ID NO: 3566 - RNA, 21 nt, Artificial Sequence
  synthetic polynucleotide
  misc_feature (1)..(21): combination of 2'-fluoro, 2'-O-methyl, phosphorothioate linked ribonucleotides
acaucuaauauuccaggacuu

SEQ ID NO: 3567 - RNA, 23 nt, Artificial Sequence
  synthetic polynucleotide
  misc_feature (1)..(23): combination of 2'-fluoro, 2'-O-methyl, phosphorothioate linked ribonucleotides
uacuucaucagaucuuagagcuu

SEQ ID NO: 3568 - RNA, 23 nt, Artificial Sequence
  synthetic polynucleotide
  misc_feature (1)..(23): combination of 2'-fluoro, 2'-O-methyl, phosphorothioate linked ribonucleotides
uacuucaucagaucuuagagcuu

SEQ ID NO: 3569 - RNA, 23 nt, Artificial Sequence
  synthetic polynucleotide
  misc_feature (1)..(23): combination of 2'-fluoro, 2'-O-methyl, phosphorothioate linked ribonucleotides
uacuucaucagaucuuagagcuu

SEQ ID NO: 3570 - RNA, 21 nt, Artificial Sequence
  synthetic polynucleotide
  misc_feature (1)..(21): combination of 2'-fluoro, 2'-O-methyl, phosphorothioate linked ribonucleotides
uacuucaucagaucuuagguu

SEQ ID NO: 3571 - RNA, 21 nt, Artificial Sequence
  synthetic polynucleotide
  misc_feature (1)..(21): combination of 2'-fluoro, 2'-O-methyl, phosphorothioate linked ribonucleotides
uacuucaucagaucuuagguu

SEQ ID NO: 3572 - RNA, 23 nt, Artificial Sequence
  synthetic polynucleotide
  misc_feature (1)..(23): combination of 2'-fluoro, 2'-O-methyl, phosphorothioate linked ribonucleotides
uagauauuggguuuuaaacaacu

SEQ ID NO: 3573 - RNA, 23 nt, Artificial Sequence
  synthetic polynucleotide
  misc_feature (1)..(23): combination of 2'-fluoro, 2'-O-methyl, phosphorothioate linked ribonucleotides
uuccauauaacuuucguucugaa

SEQ ID NO: 3574 - RNA, 23 nt, Artificial Sequence
  synthetic polynucleotide
  misc_feature (1)..(23): combination of 2'-fluoro, 2'-O-methyl, phosphorothioate linked ribonucleotides
auauacuucaucagaucuuagag

SEQ ID NO: 3575 - RNA, 23 nt, Artificial Sequence
  synthetic polynucleotide
  misc_feature (1)..(23): combination of 2'-fluoro, 2'-O-methyl, phosphorothioate linked ribonucleotides
acaaagaguggugauuuuccaua

SEQ ID NO: 3576 - RNA, 21 nt, Artificial Sequence
  synthetic polynucleotide
  misc_feature (1)..(21): combination of 2'-fluoro, 2'-O-methyl, phosphorothioate linked ribonucleotides
auucaucagaucuuagaguua

SEQ ID NO: 3577 - RNA, 21 nt, Artificial Sequence
  synthetic polynucleotide
  misc_feature (1)..(21): combination of 2'-fluoro, 2'-O-methyl, phosphorothioate linked ribonucleotides
ucacugaaucacuuuucuucu

SEQ ID NO: 3578 - RNA, 23 nt, Artificial Sequence
  synthetic polynucleotide
  misc_feature (1)..(23): combination of 2'-fluoro, 2'-O-methyl, phosphorothioate linked ribonucleotides
aagacgaaaaaugugaaaaucac

SEQ ID NO: 3579 - RNA, 23 nt, Artificial Sequence
  synthetic polynucleotide
  misc_feature (1)..(23): combination of 2'-fluoro, 2'-O-methyl, phosphorothioate linked ribonucleotides
auucaucagaucuuagaguuaua

SEQ ID NO: 3580 - RNA, 23 nt, Artificial Sequence
  synthetic polynucleotide
  misc_feature (1)..(23): combination of 2'-fluoro, 2'-O-methyl, phosphorothioate linked ribonucleotides
ucacugaaucacuuuucuucucc

SEQ ID NO: 3581 - RNA, 23 nt, Artificial Sequence
  synthetic polynucleotide
  misc_feature (1)..(23): combination of 2'-fluoro, 2'-O-methyl, phosphorothioate linked ribonucleotides
ucacugaaucacuuuucuucuuu

SEQ ID NO: 3582 - RNA, 21 nt, Artificial Sequence
  synthetic polynucleotide
  misc_feature (1)..(21): combination of 2'-fluoro, 2'-O-methyl, phosphorothioate linked ribonucleotides
auucaucagaucuuagaguuu

SEQ ID NO: 3583 - RNA, 21 nt, Artificial Sequence
  synthetic polynucleotide
  misc_feature (1)..(21): combination of 2'-fluoro, 2'-O-methyl, phosphorothioate linked ribonucleotides
ucacugaaucacuuuucuuuu

SEQ ID NO: 3584 - RNA, 23 nt, Artificial Sequence
  synthetic polynucleotide
  misc_feature (1)..(23): combination of 2'-fluoro, 2'-O-methyl, phosphorothioate linked ribonucleotides
ugcaagucugcgcucuugguaga

SEQ ID NO: 3585 - RNA, 21 nt, Artificial Sequence
  synthetic polynucleotide
  misc_feature (1)..(21): combination of 2'-fluoro, 2'-O-methyl, phosphorothioate linked ribonucleotides
agucggaacaagucugcuauu

SEQ ID NO: 3586 - RNA, 21 nt, Artificial Sequence
  synthetic polynucleotide
  misc_feature (1)..(21): combination of 2'-fluoro, 2'-O-methyl, phosphorothioate linked ribonucleotides
uccauaaucaguuaaacgggg

SEQ ID NO: 3587 - RNA, 21 nt, Artificial Sequence
  synthetic polynucleotide
  misc_feature (1)..(21): combination of 2'-fluoro, 2'-O-methyl, phosphorothioate linked ribonucleotides
acaugcuucaaguguugucau

SEQ ID NO: 3588 - RNA, 21 nt, Artificial Sequence
  synthetic polynucleotide
  misc_feature (1)..(21): combination of 2'-fluoro, 2'-O-methyl, phosphorothioate linked ribonucleotides
ucaaaggacaaaauggcaaua

SEQ ID NO: 3589 - RNA, 21 nt, Artificial Sequence
  synthetic polynucleotide
  misc_feature (1)..(21): combination of 2'-fluoro, 2'-O-methyl, phosphorothioate linked ribonucleotides
ucaucagaucuuagaguuaua

SEQ ID NO: 3590 - RNA, 21 nt, Artificial Sequence
  synthetic polynucleotide
  misc_feature (1)..(21): combination of 2'-fluoro, 2'-O-methyl, phosphorothioate linked ribonucleotides
aacauugaagcauugagacac

SEQ ID NO: 3591 - RNA, 21 nt, Artificial Sequence
  synthetic polynucleotide
  misc_feature (1)..(21): combination of 2'-fluoro, 2'-O-methyl, phosphorothioate linked ribonucleotides
uccauaaucaguuaaacgguu

SEQ ID NO: 3592 - RNA, 21 nt, Artificial Sequence
  synthetic polynucleotide
  misc_feature (1)..(21): combination of 2'-fluoro, 2'-O-methyl, phosphorothioate linked ribonucleotides
acaugcuucaaguguugucuu

SEQ ID NO: 3593 - RNA, 21 nt, Artificial Sequence
  synthetic polynucleotide
  misc_feature (1)..(21): combination of 2'-fluoro, 2'-O-methyl, phosphorothioate linked ribonucleotides
ucaaaggacaaaauggcaauu

SEQ ID NO: 3594 - RNA, 21 nt, Artificial Sequence
  synthetic polynucleotide
  misc_feature (1)..(21): combination of 2'-fluoro, 2'-O-methyl, phosphorothioate linked ribonucleotides
ucaucagaucuuagaguuauu

SEQ ID NO: 3595 - RNA, 21 nt, Artificial Sequence
  synthetic polynucleotide
  misc_feature (1)..(21): combination of 2'-fluoro, 2'-O-methyl, phosphorothioate linked ribonucleotides
aacauugaagcauugagacuu

SEQ ID NO: 3596 - RNA, 23 nt, Artificial Sequence
  synthetic polynucleotide
  misc_feature (1)..(23): combination of 2'-fluoro, 2'-O-methyl, phosphorothioate linked ribonucleotides
agucggaacaagucugcuauuuu

SEQ ID NO: 3597 - RNA, 23 nt, Artificial Sequence
  synthetic polynucleotide
  misc_feature (1)..(23): combination of 2'-fluoro, 2'-O-methyl, phosphorothioate linked ribonucleotides
uccauaaucaguuaaacgggguu

SEQ ID NO: 3598 - RNA, 23 nt, Artificial Sequence
  synthetic polynucleotide
  misc_feature (1)..(23): combination of 2'-fluoro, 2'-O-methyl, phosphorothioate linked ribonucleotides
acaugcuucaaguguugucauuu

SEQ ID NO: 3599 - RNA, 23 nt, Artificial Sequence
  synthetic polynucleotide
  misc_feature (1)..(23): combination of 2'-fluoro, 2'-O-methyl, phosphorothioate linked ribonucleotides
ucaaaggacaaaauggcaauauu

SEQ ID NO: 3600 - RNA, 23 nt, Artificial Sequence
  synthetic polynucleotide
  misc_feature (1)..(23): combination of 2'-fluoro, 2'-O-methyl, phosphorothioate linked ribonucleotides
ucaucagaucuuagaguuauauu

SEQ ID NO: 3601 - RNA, 23 nt, Artificial Sequence
  synthetic polynucleotide
  misc_feature (1)..(23): combination of 2'-fluoro, 2'-O-methyl, phosphorothioate linked ribonucleotides
aacauugaagcauugagacacuu

SEQ ID NO: 3602 - RNA, 23 nt, Artificial Sequence
  synthetic polynucleotide
  misc_feature (1)..(23): combination of 2'-fluoro, 2'-O-methyl, phosphorothioate linked ribonucleotides
agucggaacaagucugcuauuuu

SEQ ID NO: 3603 - RNA, 23 nt, Artificial Sequence
  synthetic polynucleotide
  misc_feature (1)..(23): combination of 2'-fluoro, 2'-O-methyl, phosphorothioate linked ribonucleotides
uccauaaucaguuaaacgggguu

SEQ ID NO: 3604 - RNA, 23 nt, Artificial Sequence
  synthetic polynucleotide
  misc_feature (1)..(23): combination of 2'-fluoro, 2'-O-methyl, phosphorothioate linked ribonucleotides
acaugcuucaaguguugucauuu

SEQ ID NO: 3605 - RNA, 23 nt, Artificial Sequence
  synthetic polynucleotide
  misc_feature (1)..(23): combination of 2'-fluoro, 2'-O-methyl, phosphorothioate linked ribonucleotides
ucaaaggacaaaauggcaauauu

SEQ ID NO: 3606 - RNA, 23 nt, Artificial Sequence
  synthetic polynucleotide
  misc_feature (1)..(23): combination of 2'-fluoro, 2'-O-methyl, phosphorothioate linked ribonucleotides
ucaucagaucuuagaguuauauu

SEQ ID NO: 3607 - RNA, 23 nt, Artificial Sequence
  synthetic polynucleotide
  misc_feature (1)..(23): combination of 2'-fluoro, 2'-O-methyl, phosphorothioate linked ribonucleotides
aacauugaagcauugagacacuu

SEQ ID NO: 3608 - RNA, 21 nt, Artificial Sequence
  synthetic polynucleotide
  misc_feature (1)..(21): combination of 2'-fluoro, 2'-O-methyl, phosphorothioate linked ribonucleotides
acauccggaacaagccaucac

SEQ ID NO: 3609 - RNA, 21 nt, Artificial Sequence
  synthetic polynucleotide
  misc_feature (1)..(21): combination of 2'-fluoro, 2'-O-methyl, phosphorothioate linked ribonucleotides
acaucugcaacaagccaucac

SEQ ID NO: 3610 - RNA, 23 nt, Artificial Sequence
  synthetic polynucleotide
  misc_feature (1)..(23): combination of 2'-fluoro, 2'-O-methyl, phosphorothioate linked ribonucleotides
uuccacauaacuuucguucugaa

SEQ ID NO: 3611 - RNA, 23 nt, Artificial Sequence
  synthetic polynucleotide
  misc_feature (1)..(23): combination of 2'-fluoro, 2'-O-methyl, phosphorothioate linked ribonucleotides
uuccauacaacuuucguucugaa

SEQ ID NO: 3612 - RNA, 23 nt, Artificial Sequence
  synthetic polynucleotide
  misc_feature (1)..(23): combination of 2'-fluoro, 2'-O-methyl, phosphorothioate linked ribonucleotides
aaucuuauauuccaggacauauu

SEQ ID NO: 3613 - RNA, 23 nt, Artificial Sequence
  synthetic polynucleotide
  misc_feature (1)..(23): combination of 2'-fluoro, 2'-O-methyl, phosphorothioate linked ribonucleotides
aaucuaacauuccaggacauauu

SEQ ID NO: 3614 - RNA, 23 nt, Artificial Sequence
  synthetic polynucleotide
  misc_feature (1)..(23): combination of 2'-fluoro, 2'-O-methyl, phosphorothioate linked ribonucleotides
acauccaauauuccaggacauuu

SEQ ID NO: 3615 - RNA, 23 nt, Artificial Sequence
  synthetic polynucleotide
  misc_feature (1)..(23): combination of 2'-fluoro, 2'-O-methyl, phosphorothioate linked ribonucleotides
acaucuauuauuccaggacauuu

SEQ ID NO: 3616 - RNA, 23 nt, Artificial Sequence
  synthetic polynucleotide
  misc_feature (1)..(23): combination of 2'-fluoro, 2'-O-methyl, phosphorothioate linked ribonucleotides
agcauuuaauauuccaggacauu

SEQ ID NO: 3617 - RNA, 23 nt, Artificial Sequence
  synthetic polynucleotide
  misc_feature (1)..(23): combination of 2'-fluoro, 2'-O-methyl, phosphorothioate linked ribonucleotides
agcaucuuauauuccaggacauu

SEQ ID NO: 3618 - RNA, 21 nt, Artificial Sequence
  synthetic polynucleotide
  misc_feature (1)..(21): combination of 2'-fluoro, 2'-O-methyl, phosphorothioate linked ribonucleotides
aggcaccuaauauuccagguu

SEQ ID NO: 3619 - RNA, 21 nt, Artificial Sequence
  synthetic polynucleotide
  misc_feature (1)..(21): combination of 2'-fluoro, 2'-O-methyl, phosphorothioate linked ribonucleotides
aggcauccaauauuccagguu

SEQ ID NO: 3620 - RNA, 21 nt, Artificial Sequence
  synthetic polynucleotide
  misc_feature (1)..(21): combination of 2'-fluoro, 2'-O-methyl, phosphorothioate linked ribonucleotides
aaggcuucuaauauuccagga

SEQ ID NO: 3621 - RNA, 21 nt, Artificial Sequence
  synthetic polynucleotide
  misc_feature (1)..(21): combination of 2'-fluoro, 2'-O-methyl, phosphorothioate linked ribonucleotides
aaggcauuuaauauuccagga

SEQ ID NO: 3622 - RNA, 23 nt, Artificial Sequence
  synthetic polynucleotide
  misc_feature (1)..(23): combination of 2'-fluoro, 2'-O-methyl, phosphorothioate linked ribonucleotides
aaagguaucuaauauuccagguu

SEQ ID NO: 3623 - RNA, 23 nt, Artificial Sequence
  synthetic polynucleotide
  misc_feature (1)..(23): combination of 2'-fluoro, 2'-O-methyl, phosphorothioate linked ribonucleotides
aaaggcaccuaauauuccagguu

SEQ ID NO: 3624 - RNA, 23 nt, Artificial Sequence
  synthetic polynucleotide
  misc_feature (1)..(23): combination of 2'-fluoro, 2'-O-methyl, phosphorothioate linked ribonucleotides
aaaagccaucuaauauuccaguu

SEQ ID NO: 3625 - RNA, 23 nt, Artificial Sequence
  synthetic polynucleotide
  misc_feature (1)..(23): combination of 2'-fluoro, 2'-O-methyl, phosphorothioate linked ribonucleotides
aaaaggcuucuaauauuccaguu

SEQ ID NO: 3626 - RNA, 23 nt, Artificial Sequence
  synthetic polynucleotide
  misc_feature (1)..(23): combination of 2'-fluoro, 2'-O-methyl, phosphorothioate linked ribonucleotides
uuuaauaggcaucuaauauucuu

SEQ ID NO: 3627 - RNA, 23 nt, Artificial Sequence
  synthetic polynucleotide
  misc_feature (1)..(23): combination of 2'-fluoro, 2'-O-methyl, phosphorothioate linked ribonucleotides
uuuaaaacgcaucuaauauucuu

SEQ ID NO: 3628 - RNA, 23 nt, Artificial Sequence
  synthetic polynucleotide
  misc_feature (1)..(23): combination of 2'-fluoro, 2'-O-methyl, phosphorothioate linked ribonucleotides
agaacuuuuuuaaaaggcaucuu

SEQ ID NO: 3629 - RNA, 23 nt, Artificial Sequence
  synthetic polynucleotide
  misc_feature (1)..(23): combination of 2'-fluoro, 2'-O-methyl, phosphorothioate linked ribonucleotides
agaacaucuuuaaaaggcaucuu

SEQ ID NO: 3630 - RNA, 23 nt, Artificial Sequence
  synthetic polynucleotide
  misc_feature (1)..(23): combination of 2'-fluoro, 2'-O-methyl, phosphorothioate linked ribonucleotides
aagaccaaaaaugugaaaaucuu

SEQ ID NO: 3631 - RNA, 23 nt, Artificial Sequence
  synthetic polynucleotide
  misc_feature (1)..(23): combination of 2'-fluoro, 2'-O-methyl, phosphorothioate linked ribonucleotides
aagacgauaaaugugaaaaucuu

SEQ ID NO: 3632 - RNA, 23 nt, Artificial Sequence
  synthetic polynucleotide
  misc_feature (1)..(23): combination of 2'-fluoro, 2'-O-methyl, phosphorothioate linked ribonucleotides
augggucauugaagcauugaguu

SEQ ID NO: 3633 - RNA, 23 nt, Artificial Sequence
  synthetic polynucleotide
  misc_feature (1)..(23): combination of 2'-fluoro, 2'-O-methyl, phosphorothioate linked ribonucleotides
augggacuuugaagcauugaguu

SEQ ID NO: 3634 - RNA, 21 nt, Artificial Sequence
  synthetic polynucleotide
  misc_feature (1)..(21): combination of 2'-fluoro, 2'-O-methyl, phosphorothioate linked ribonucleotides
aacugcgacauugaagcauug

SEQ ID NO: 3635 - RNA, 21 nt, Artificial Sequence
  synthetic polynucleotide
  misc_feature (1)..(21): combination of 2'-fluoro, 2'-O-methyl, phosphorothioate linked ribonucleotides
aacugggucauugaagcauug

SEQ ID NO: 3636 - RNA, 23 nt, Artificial Sequence
  synthetic polynucleotide
  misc_feature (1)..(23): combination of 2'-fluoro, 2'-O-methyl, phosphorothioate linked ribonucleotides
uaagucauugagacuauauuuuu

SEQ ID NO: 3637 - RNA, 23 nt, Artificial Sequence
  synthetic polynucleotide
  misc_feature (1)..(23): combination of 2'-fluoro, 2'-O-methyl, phosphorothioate linked ribonucleotides
uaaguuacugagacuauauuuuu

SEQ ID NO: 3638 - RNA, 23 nt, Artificial Sequence
  synthetic polynucleotide
  misc_feature (1)..(23): combination of 2'-fluoro, 2'-O-methyl, phosphorothioate linked ribonucleotides
agggacuuuucagaauccugcuu

SEQ ID NO: 3639 - RNA, 23 nt, Artificial Sequence
  synthetic polynucleotide
  misc_feature (1)..(23): combination of 2'-fluoro, 2'-O-methyl, phosphorothioate linked ribonucleotides
agggagucuucagaauccugcuu

SEQ ID NO: 3640 - RNA, 23 nt, Artificial Sequence
  synthetic polynucleotide
  misc_feature (1)..(23): combination of 2'-fluoro, 2'-O-methyl, phosphorothioate linked ribonucleotides
ugcaacucugcgcucuugguauu

SEQ ID NO: 3641 - RNA, 23 nt, Artificial Sequence
  synthetic polynucleotide
  misc_feature (1)..(23): combination of 2'-fluoro, 2'-O-methyl, phosphorothioate linked ribonucleotides
ugcaaguuugcgcucuugguauu

SEQ ID NO: 3642 - RNA, 23 nt, Artificial Sequence
  synthetic polynucleotide
  misc_feature (1)..(23): combination of 2'-fluoro, 2'-O-methyl, phosphorothioate linked ribonucleotides
acaaccgacauaugcuuuccuuu

SEQ ID NO: 3643 - RNA, 23 nt, Artificial Sequence
  synthetic polynucleotide
  misc_feature (1)..(23): combination of 2'-fluoro, 2'-O-methyl, phosphorothioate linked ribonucleotides
acaacugucauaugcuuuccuuu

SEQ ID NO: 3644 - RNA, 21 nt, Artificial Sequence
  synthetic polynucleotide
  misc_feature (1)..(21): combination of 2'-fluoro, 2'-O-methyl, phosphorothioate linked ribonucleotides
uagauuuuggguuuuaaacuu

SEQ ID NO: 3645 - RNA, 21 nt, Artificial Sequence
  synthetic polynucleotide
  misc_feature (1)..(21): combination of 2'-fluoro, 2'-O-methyl, phosphorothioate linked ribonucleotides
uagauaucggguuuuaaacuu

SEQ ID NO: 3646 - RNA, 23 nt, Artificial Sequence
  synthetic polynucleotide
  misc_feature (1)..(23): combination of 2'-fluoro, 2'-O-methyl, phosphorothioate linked ribonucleotides
uagagcuauacaaucaguuaauu

SEQ ID NO: 3647 - RNA, 23 nt, Artificial Sequence
  synthetic polynucleotide
  misc_feature (1)..(23): combination of 2'-fluoro, 2'-O-methyl, phosphorothioate linked ribonucleotides
uagaguuuuacaaucaguuaauu

SEQ ID NO: 3648 - RNA, 21 nt, Artificial Sequence
  synthetic polynucleotide
  misc_feature (1)..(21): combination of 2'-fluoro, 2'-O-methyl, phosphorothioate linked ribonucleotides
auucaccagaucuuagaguua

SEQ ID NO: 3649 - RNA, 21 nt, Artificial Sequence
  synthetic polynucleotide
  misc_feature (1)..(21): combination of 2'-fluoro, 2'-O-methyl, phosphorothioate linked ribonucleotides
auucaucugaucuuagaguua

SEQ ID NO: 3650 - RNA, 23 nt, Artificial Sequence
  synthetic polynucleotide
  misc_feature (1)..(23): combination of 2'-fluoro, 2'-O-methyl, phosphorothioate linked ribonucleotides
uacuuuaucagaucuuagaguuu

SEQ ID NO: 3651 - RNA, 23 nt, Artificial Sequence
  synthetic polynucleotide
  misc_feature (1)..(23): combination of 2'-fluoro, 2'-O-methyl, phosphorothioate linked ribonucleotides
uacuucaccagaucuuagaguuu

SEQ ID NO: 3652 - RNA, 23 nt, Artificial Sequence
  synthetic polynucleotide
  misc_feature (1)..(23): combination of 2'-fluoro, 2'-O-methyl, phosphorothioate linked ribonucleotides
ucaaacgacaaaauggcaauauu

SEQ ID NO: 3653 - RNA, 23 nt, Artificial Sequence
  synthetic polynucleotide
  misc_feature (1)..(23): combination of 2'-fluoro, 2'-O-methyl, phosphorothioate linked ribonucleotides
ucaaaggucaaaauggcaauauu

SEQ ID NO: 3654 - RNA, 23 nt, Artificial Sequence
  synthetic polynucleotide
  misc_feature (1)..(23): combination of 2'-fluoro, 2'-O-methyl, phosphorothioate linked ribonucleotides
auaauuaaaggacaaaauggcuu

SEQ ID NO: 3655 - RNA, 23 nt, Artificial Sequence
  synthetic polynucleotide
  misc_feature (1)..(23): combination of 2'-fluoro, 2'-O-methyl, phosphorothioate linked ribonucleotides
auaaucauaggacaaaauggcuu

SEQ ID NO: 3656 - RNA, 15 nt, Artificial Sequence
  synthetic polynucleotide
caucuaauauuccag

SEQ ID NO: 3657 - RNA, 15 nt, Artificial Sequence
  synthetic polynucleotide
ugggacauugaagca

SEQ ID NO: 3658 - RNA, 15 nt, Artificial Sequence
  synthetic polynucleotide
aucagaucuuagagu

SEQ ID NO: 3659 - DNA, 10 bp, Artificial Sequence
  synthetic polynucleotide
acctggaata

SEQ ID NO: 3660 - DNA, 10 bp, Artificial Sequence
  synthetic polynucleotide
ttagatgcct

SEQ ID NO: 3661 - DNA, 10 bp, Artificial Sequence
  synthetic polynucleotide
aaggcatcta

SEQ ID NO: 3662 - DNA, 10 bp, Artificial Sequence
  synthetic polynucleotide
atattccagg

SEQ ID NO: 3663 - DNA, 11 bp, Artificial Sequence
  synthetic polynucleotide
atgtcctggaa

SEQ ID NO: 3664 - DNA, 11 bp, Artificial Sequence
  synthetic polynucleotide
tattagatgct

SEQ ID NO: 3665 - DNA, 10 bp, Artificial Sequence
  synthetic polynucleotide
gcatctaata

SEQ ID NO: 3666 - DNA, 10 bp, Artificial Sequence
  synthetic polynucleotide
ttccaggaca

SEQ ID NO: 3667 - DNA, 10 bp, Artificial Sequence
  synthetic polynucleotide
cctggaatat

SEQ ID NO: 3668 - DNA, 10 bp, Artificial Sequence
  synthetic polynucleotide
tagatgcctt

SEQ ID NO: 3669 - DNA, 10 bp, Artificial Sequence
  synthetic polynucleotide
aggcatctaa

SEQ ID NO: 3670 - DNA, 10 bp, Artificial Sequence
  synthetic polynucleotide
tattccagga

SEQ ID NO: 3671 - DNA, 21 bp, Artificial Sequence
  synthetic polynucleotide
ttcaggatgcgatgtctatgc

SEQ ID NO: 3672 - DNA, 20 bp, Artificial Sequence
  synthetic polynucleotide
tgcccaaagagtggtgattt

SEQ ID NO: 3673 - DNA, 9 bp, Artificial Sequence
  synthetic polynucleotide
agccgctgg

SEQ ID NO: 3674 - DNA, 15 bp, Artificial Sequence
  synthetic polynucleotide
aaacactgaagagtt

SEQ ID NO: 3675 - protein, 17 aa, Artificial Sequence
  synthetic polypeptide
SPLFGQYFVLENPGTIK

SEQ ID NO: 3676 - protein, 14 aa, Artificial Sequence
  synthetic polypeptide
LISWYDNEFGYSNR
